United States Patent Application Publication US 2026/0258423 A1 - sequence listing, part 43

SEQ ID NO: 301568 - DNA, 83257441 bp, Homo sapiens (residues 8,539,229-10,674,035 of 83,257,441)
  source 1..83257441: mol_type = genomic DNA
gtaacggaaaacagactaggacactcgccaaataacttccctaaaataccactttcaacgtgctgttcacctgctgatttctgaccataaaactcatccctggaatgctccctgcacagcatccacgcctgtaataccttccacaacactgccagcctactttgtggcctttgcctttttccgaattcacagagcatcagttagagtcatacccaggaaccaatgagctcaccactatgttgtgttctgttttctggcttcaagatcaggttcttgaggaccaaggccatgctatatactatctcatatccccatggcacccccaatctgcatttccaggccataattgaggatttaataaattcttttctttttttttgagatggggtctcactctgtcactcaggctggaaggcagtggtgtgaccgtatcactgtagcctccaactcagggcctcaaaggatcctcccgcctcagcctcctgagtagctggtactacaggcacatgacaccatacctggctaattttaaaactttcttgtagagatgtagtcttactatgttgcccaggctggtctcgaactcctggtcttaagtgatcctcttgcctcagctttccaaagcactgggattacaggcataagccaccacacctggtccaataaattgctatctggatcttattctaccaccacaatatttacacataaggcctggaaaataattaaaaatgtaaacatcaaaccctttctacttcacttatttatttttttgtttggaaacagggtctcacgctgtcgcctagactggagtgcagtggtgcaatctcggctcactgcaacctctgcctcctgggtttaagtgattctcatgtctcagcctcctgagtagccgagactacaggcacatgccaccacatccggctaattttctgtatttttagtagagatggggtttcaccatgttggccagattggtctcgacctcctgacctgactcaagtgatctgcctgcctcagcctcccaaagtactgggattataggcgggagccacagcacctggccttctacctcacctatttttgcttggagttggttattagggttgaaatgtttaattactttaccccatgattttcacctttagagtacaattattgtgtgagagtaaaaaaaaaatatgcaaaaatggtatataaagtattttgtcctagaggataaagcaaaagaaatgcaattaagtaacattaagaagaattaatatttgtgagactcatttaaaggtcacaaaaccattagatttaaaaacactctaaaaacatttaaaaaattaagacaggtaattttccatttggaagactttcggcacaattattcctataaagatactgacctagcaaattttatgggttctcgtccatcctaaaataaaactgcaggtacataatcattatattcttaaaatgtaggacttccagtgtcatatggacgcatataatgagcatctcaaaaaacatatcatatagtcatcaatagtactaatgtgaaatactcccttcccttatttacataaatgcccaaacaattctttaggcaacaaagcagtgatgaaatgtaatgaagtgtgttcatgtgcttgtgtatgcacaagttacctggaagtcactacaagcatgccacctctaaatgaccctataagctacaaagaagcaactatcctcacaactataagtaatttaagatttttgctctaaacgtgacttgaaaggtaaaatgatttcttatgtattataaaagccaaatgaaaattttctattgctttccttaaactcaaatttctaatgtgctggaactacatctctaataggggtgaatgtcttctaggttcttcctcttcccgatgtgccactgctcctcctgactgcaggtactgtaccatccatgatctctagccattagacctccaacaccttcaaacatgaagaacacaagtggcaaccagagattgagcagcaagaaccagaactgcttcaaagcctgctgcacctcctaggagaaaactctgcgttattcaaacatacctacttaactagtgttagagcttcctctacgttacagatatcggtggttaatcatgttttagtttttcttatattttggcagatagcaaaataaaataaatgaagctgacaccttgttgagcaaaagctaactgataaggagtacagaaccagattgtcaacacttgcttgagatcacatggagctgagttccaaaagtgaatgagttatacactcgaagcttgaacgtgaatgagttctatgtatttttacagaacattaaaccaccaagaaaagagtttctgatgctttctaagattgccactaaaaatacatctgacaagacttccctgagaacaaaaacttcaaattaaaaaaaaaaatctggcaaaataaaaacatctttgtactttaaaaggccaaactttagttatctgcaaaatggatttacgtgacacgtcttgttctcagctaaataaagtgtcaggtggagctccacatcctttgaaaggtacacacaaatgccagcgcacagggccatctgcagtctgtgcgagccagagcccactatccagtattcccatgcaagcaaggacaggaatcaagctgcgaggagagctaaagaagggttttactggcatgctactgacttttaaattctgtagctattttatcagagtatcaccttcctagaaaatttagatcagaaaattatttcaccactgaacagactgggtaatttctgtcttgggttatgccacttaaggtcactgcttgagtggaaaatgaaagacagcgagcaagtgagcactcttacaggtctctctattaggtcgatgcatggctgcagatccagcccgaaatcgatgaagttccactcgatgccttcgcgctggtattcctcttgttctaggataaacatggtgtggttgaacagctgctgcagcttctcattggtgtagttgatgcaaagttgttcaaaggagttcagctacaaatgtcaaagggtaattttccaaacatggggaggtggagggaaaatgggaataattagttatgtagttataaaaaaatttttcattaaacattactaattaggtaggaagtacatgattgcttctatctaatgacagtgactaaaccaaggggggtggtctcccaatccctctctcacacacagcctttttgaaaaggtaaagagaaagaacatactgtctatggctgcattactgaactgctaaaatgaaaagataataaacttaatatgctaactgaatgctctgcaagtaaaacaattcagttcttattagtgaatggttaaggactataaataaataaatgagacagtaagaaaaagaagaaaaacaaaggcttggaaaaaccagaggcaaaggaaggcgaacaaggtggtgggcgcgcttctgaagctggggtggagaatgcatttggttctgtcccactccactgtcactcaggctgtgggctctaaggtgaggtaggaaaagagtcatctttactgcatggaattgctgagagctcagccaggcctggcacatggaatgcgcttagtatgagactctctatcgtttctctaagcattcccttcccttatcaaatgtttgacctttgcaataccaaaagtgatattggactgccctcataaagtgaatttaggcatttttcatatgttattgtcatttctgttccttctctgtgaactctgcccattttttaagagaaaaattgattgggcgaatgcatagatgggtgaattaataggtataattttcttaatcatcctatacactagaagtgctcaacctctttcctgcttctatactgttcacacagctgcatgtgcccataaataacctctttcattataaaaagtgattttcaattaaagaggatttaacccatctccaaggagttgatttacagtctgaaaaagccactccaatcttttccattctccagaagctgttaaattcactatttcagaatgaggtcatgcaaggagggcaggggcagtgcttgccttgctcaacactgtatttctggcacgcatgacaagcctcatatttacagactgccggattctgcttattcatgttcatgtaggtgaactttgctttgcctcaggatgatgacatcctattgctctatttagcctgggccattacaaagaaggttttttttttttttttaggagtctcgttctcttgcccaggctggagtacagtggcacaatcttggctcactgcaacctccgcctcccgggttcaagcaattctctgcctcagccttcggagtagctgagattacaggcatctgccaccaagcccagctaatttttgtatttttagtagagacagggtt[143 bp omitted]atatttaaactaccaattataattttaattgatttttaaatcaataatgcatggtagaaaattcaaagtgtacaaagaattgcaccagtttcacttcaatgaaacttacttgttctccctattatcaaccagtatctcctatttttgtgatctttccagaaatatgctatgcattaagaaatgtgtgtatgtgtgtgaccctgattttttttaacttaacaatgtatcttgttatgttgtgggatctttccttagtgtataaagccagcccattctttataatggatgcatagtattccactgtatggagctatcacaataatttgaaccagtttcctaaaggtgggcatttaggctttttctttccttttctcatgacaaataacactcactgaacaacttagcatttttaccatctacataaatgtcacattttcccatcgagaacagggtgtgtctcctcacttgttcaagtcttcttttcttttttgcagcagcactgtaaagttgccttcatttaaatcttgcccatttcttttaaaatttatttttaggtgttttgtctgtttgttgcagttggaaatgtgggtcttttctttcactatatcttctgatcgtttatgtagaggaaagtgacagatttttttaatgcaatttgtacccagccacttttcatgatttcttaatatatttacaaatcaaaacaccttaaagcaatctcttagagtggcagtggcaggttcagtatttatgaggatagacttataattttaaaggggttcattttaaaataagacaattcaatacccaatagtggctacagtaacacacagatgatcacaaaaagcacttaatatttgtgccgtactatatttacatagtttacatctatatttatggaaataaagatataaatttttagatgccccaaattttatgcacctccctgaaacaccgtagcaggtgtgtgactgtgaaacttttctgcattgatgatgagtaagtatttggataaatctagtcagatcaacagtgaaatctattgttaaaccctggttatatctgcagtacacagatcactgcccgtccaggtgcctccctctcactttgctcctctcctgattccccagccaagcccccgtcatcttgcccgtgttctactacagtggcccccttgatggtctctcgacctggccccatgctcttctccacgtctccaactcctctctccctctggtcagctatatccagtcatactggctttctagcagcttagaacatttgttaagttctgtcccatacaggaccactggaattactctcattatgccgggaaactgaccgaggctggcagcttctcatccttcaagtaagcctaactgttgccaatgcagaagcaaccttccctgaacagctatctcaagctggcctcccagttctatcacagcaccctttcagtgcattctcacagacctgcggattcactgattatttgccatttattgtttggctctactagaatggcagggactgtatccctggtgcctcgtatgtactgggcacacagtaagccttcatatttgttaaaagaacaaacaaaaagaaggacgagctagaggaagagggggaagaatacctcaaaaatttcaaatccagcaatatccaggattccaatgaaagatgctccctgacgtttggtcctatccagagctttattgatgcgatgaacgagccagcgaaagagccgctcataggtagcttttgccaatgcttctactgcaaaatctgcctgtaattaaatcacaacaaccttttattctggaaacaatctcaacaaagcataaatagctgttttacggaatttaatgttatacagcactcaaaaaacctgagatggcattcactgcttaatcatgtctcaattttacacatcaatagaaggcaatattagaagaattaaatgaacacagggaataacgaatttgggggatgggtaaagacgcctaataaaaataagctcctccccatgcgcctgggtcctgggtagcactgtccgcctggattcagctcagttaagctggtactttctctctgctgtaccacccagcacaaggacaaggcggcaggggcccttgtgttggtctggttcccgaagtatgcagatttgtctactggattatctatctacctggggaaaactagagattataatttgacatttactttttttaaaaaatcacctttaaaaaaattttttttttttttgatacggagtctcgttctgttgcctgggctggagtgccgtggtgcaatctcagctcactacaacctccgcctcctgggttcaagcaattctcccgtctcagcctcttgagtagctgggactacaggcgcatgccatcacgcccggctaatttttgtatttttagtagagatggggtttcaccatactggtcaggctggtctcaaactcctgacctcaggtgatctgcccacctcagcctcccaaagtgctgggattacaggtgtgagccaccggccccggccccttttaaattttttcgaaaacgaaaaagtaaatatacttaaaaaaaaaaaactcatttagtacctaaaaacacccatgtaagacagtttatattgattcagtttgttacatgtcaatcagaaggccaaatggccatggcttatcattcaaacaaatcagtaataacaatgaacatgaaacctacctgttctttggtctgggctttttgcacatagtctcggccgaccttgatccggggagtcaggatggcccgagtaaactccatcacattcatcccaagaagatggcagagcttctgcgcaactgaagtgtaaaaagtctcctaaatcctacattttttacttacaatctactcacaatatattcaataaacactggaaaaaccttagtaacaattaaattgtattaagaaataaataaaagtcttaaaatcagacaagttttaggtctaatgaaaaataccttccatcttttcaaattaatacacactcatttttaggctacaagagatggctagtcagcatttgactgccttgcctatttattcatttttttagaggcaggttctcactatgttggccaggatggagtgtagtggctattcacaggcatgatctcactactgatcagcacgggagttttgacctgctccattttcaacttgggctggttcactcctccctaggcaacctagtggtcccctactgctgggaggctaccatatactgatgctgaacatagtgtagacaaccgacgggcatagcacgacagcctagaactcctgggctcaagccatcctcctgcttcagcctcccgagtagctgggactacatggccactatgcccagcctccttacctttacaagagtgacctgatcctcctctatttatgggtcattaaaaaatttcaaagccaagctatactaatatatgccttactctgcattttagatggctccattttaagtctatttaaccatggaaaagccatacggaggatggaggcccaaccgccaatcaaactactttgactgaatgacagatgaatggtcctggaaatcaacagccctaataggaggtgccacagcttggccagaaaatggtgaccaagaagcagcaggagaggcaggccccttagaagagccacacagaattaaattgttatcaagcctcaaattggttataaaaaacgattatttcaagggcagataatgtgactttatgtcagccttcacccgccacagtggactgcggatgcctccatgaggcaagataactaacttgttagaataatcaagcagtcaaggcaatatagagattcctcactttttctctccagaccatctgaagcaaactgatatatatataatatatatgtatattatatatacatatatttaataaatatatactttatatccatattatatttatatatttatattaaatatatatttaataatatattatatatatatatttgggtcacaaacttttgttcctgaccaatgcaaatttaaaaccattttcgacatttaaaaatgggaatatttcctattaagatctagatttccatttttctttgaaaagtcacttatatttggcaatactgggcctgtaatcctggcaaggtgcacactggctggaactcggcagctgcaccaccctctcaggtaagtgtgtgacctcctgcggctgagttctcctccctcaattcccaaggcctcctgcatgctaaggcagagaccactgctccttttcatcctacaccctgtcccctgtcctcatttatagaatcagaggaaccctcgtgtaaatacacgatgttgtcactctactcaagggtcccttcagaaatgcttcagaggtgcttttacgcttgcactgtaacaccttcttagagagcacaacaagccatcgaaacagaaataaagtcagtattcatcagtttacctgtattttctggcatggaagcttgatcagtatttctctcctttttgaaagaaatatttccaaactgtagcactgaagatactactttaagcattgcttcatattgataaaaagaaaaaaaaaattaatattgcctcaaaatgtagcggagacatattctcatttattttgtgctaaaaattagctatacaaaacttttcagtaagacatgtcttttcaggatttcatacaattcattagtttcccagtcattttctagtttaggtgatttaccccagatgtataagtcttaggaaagtgagtaccagaatcttagagaaatcacacatacacagaatctcttcatgggagaagcccattatgtgcattgcttccatggtctcctggaaattatctttgtcttgctgtcccggaataggaatatagccattggagagaaacctgtagttattaaatccttcaagaagcaaatcagctaaaaggaaatataatggaagaaaatttgataaatactcatgaagacaactaagccataactgcattcaaactgtgccagtgtcacaggagagcagtggtcaccatgcaacccattgccagcaaaatgttttttttctttatatattcatgtaaatacacaaacatacatttttttaattatctgtaccaacaaaggaaaatgatgatgttaacaacgcaaaaaccttaacaggagttttggggatggcagtttgtacaatattctgtttgaaattggttatctgcgaaatgatgtcaattgtccagatgacaaaactctattgttttcagatttaaatattttagccctcttttttgaaggaaagcttttaaactcatattctatattcctatcttagcaagtagtttgcagcaaacactatgaagtgaatatgaaaactaccatggacataagctaaagatacagtgatgtggaccaagcacgtcccgagcccagcaaaggccctgaaacactttctccaagccagcttgcttggtggttaagttgcctttagaatgatgatgtgatgtggcgcagcagactattgtaacaggtacccgcactgactactgtaccgtaggagacatgaattaaagagaacttactcttttgacaaatgcattcttgagagccaaagaatatttctcaggagtgctcaaaatagcagggctatttatcgttataacagatatgcaaatatgctcccagctttctttgtgactggctctcttgctctcctgcagagaatttctgcaggtcaccctgtcccgttattcttgtctacatcacatttaacttctacagggtactgcctgctgctttctttttctatttctttcaacactttgatcattttaaagaatttactcgctctccctctccctctccctctctttccacggtctccctctcatgctgagccgaggctggactgtgctgctgccatctcggctcgctgcagcctccctgcctgattctcctgactcagcctgcccagtgcctgcgattgaaagctcgcgccgccacgcctgactggttttggtggagacggggtttcgctgtgttggccaggccggtctccagcccctaaccgcaagtgatccgccagcctcggcctcccgaggtgccgggattgcagacggagtctcgttcactcagtgctcaatggtgcccaggctggagtgcagtggcgtgatctcggctcgctacaacctccacctcccagccgcctgccttggcctcccaaagtgccgagattgcagcctctgcccggccgccaccccgtctgggaagtgaggagcgtctctgcctggccgcccatcatctgggatgtgaggagcccctctgcctggctgcccagtctggaaagtgaggagcgtctccacccggctgccatcccacctaggaagtgaggaacacctcttcccggccgccatcacatctaggaagtgaggagcgtctctgcccggccgcccatcttctgagatgtggggagcgcctctgccccgccgccccgtctgggatgtgaggagcacctctgcccggccccgaccccgtctgggaggtgaggagcatctctgcccggccgccccgtctgagaagtgaggagcccctccgcccggcagccgccccgtctgagaagtgaggagcctctccgcccggcagccaccccgtccgggagggaggtgggggggacagccccccgcccggccagccgccctgcccgggaggtgaggggcgcctctgcctggccgcccctactgggaagtgaggagcccctctgcccggccaccaccccgtctgggaggtgtgcccagcagctcattgagagcgggccaggatgacagtggcggctttgtggaatggagaggcgggaggggtggggaagggattgagaaatcggatggttgccgtgtctgtgtagaaagaagtagacatgggagacttttcattttgttctgtactaagaaaacttcttctgccttgggatcctgttgatctgagaccttacccccaaccctgtgctctctgaaacatgtactgtgtccactcagggttaaatggattaagggcggtgcaagatgtgctttgttaaacagatgcttgaaggcagcatgctccttaagagtcatcaccactccctaatctcaagtacccagggacacaaacactgcggaaggccgcagggtcctctgcctaggaaaaccggagacctttgttcacttgtttatctgctgaccttccctccactattgtcctatgaccctgccaagtccccctctgtgagaaacacccaagaattatcaataaaaaataaataaataataaatttaaaaaaaaaaaaaaagaatttactcctattgcagttattgccagtctgaaagcctgagcattttcttctcttcagtgttacatactgcatcatcttgaatttttagtctctccttggcaataactctatttttttgttgcttgatttttcccttgcaggtcattctctgattaatttttgggttcaaaggtttcacagatgtctgtggttagcaaaagcctggatgccagatgagaaaacttttactgtatatgtgtctactttgatatctagataatatatataataatcatgcagaaacactaaatttgagaatcagaagagatgggaaagttatacatcttctcctctccctcaatatatttctaacccagcaaaattctgacccagacctgagctctcctttgtacctgcccaactctaaacttctagtccttgtgatccctgacattcaatcaatcaatatccaccacaggctctttctagtactagtggaagcaataacatatattcagttgtaaatctagaaataaaaatatttattctacttaatttcattaggtaaatttcttttcccttactttcatattttaaaacgttgaaacagagttgtaaaatacgcatcatttgtcttctaatttaaaaaattttaaaaaagaaataaaagtacaaaagattatattatctacaatacctgccgcttaaaataaagtacttaccccatggcatggaagttcaatttcattttgattttcatgatttaaccagctggaaatttggtgttttgtgtgtaaaaaactgtttcccaaaattgttttttctcaaaaaaaaattaaaagagatattccagtgaatataaaatagtaaaaacctttgtaacttacactttaggtgttctcctgctccagataacaactggtaaaagatatgaaaagtacgttcatcttttgcttgacgaacagcacgagacttttccagaaggtctgagcaaagacagttaagaattaaattatttaatataattcttaaataaataaaggccctctttcagcgtctgtaaatttaaatcataaaacatcttctttctctgattattatataaactatcctgcaatgaactattctaaatgactgtcttccatctgtgaaaaaagaaaataggtgcaacttacgttcctcactgatcttccagaatcattggtctgggaaggaacttaaagattatacgtgcttccctcactcagctccactctaccccatccttcccctaacttggattacattcaaagaataccacactatacgaggaactgtaagaagctattgaaaatgaagtacagttgtttaaggcaggagaagctctataataccagattaacacaattttataaataaggaagccatggtataaggaaattagtcaaaataatatagttaataagtggtacagttaggaaccaaaaacttggcttgactccaaaatgcatgatgagagtgcccacaatgctaccctattgaaagcctcctatatgagaggcactcgcccttcacactcagcagcacatgtaactttcccatatgccttgacagctacgatgagattaagcactagtcttccctctgctgctctgaagaaccggtgcggccagtacctacgcctgctgctacccaccctgcctgggcttcccagggggcaggtggcacagtccccagcagctcctgcatttcagaccactgcacacccagctgtgtatcttatctggggctcagatccacagttcttgatgctcccggagttcctatgggttgacagtcacaccggcatctcagagaacgtgtatcacagctttggaagatgtttgcctctcttgaggtaaaccttccctggggccaccaaagtaaattaattctgtatgtgtcagatagcctgaattttaagtcagactatcccacacatcctccacgtctggtgaaagacacactcatatgaatcatgctctgacacacctatatgaagaaagctgaactgcagattcattctcctgtcattttcaagtatttccagattttgctggctgtgagtccatttggaggcataaaatactgttcttaaccagaaaatcatggtctgtcccttgaaggatagaaataatgtatttctatcactggagattattctattaagtacccgaaaactgtcatctatctttctaattggcacactatcattcagaatcatttctattttattacatctatactcaaatgtgttttacctgggtatatatgtgcatacacatatataaaccttcttatggccattctatgcaggtgacatttcttaggactattctatgtacttgacattttatttttttctccagctttattctacttaacactaattgagattactttaactctgtaatcttataaggatgttttcaatgattacatgctcatccttctaatatcagaagtagatggtaaaaagtgggctaacagcaatagggggagggcaactgcattcatctgaatgtcctatatcacacaaacactgtggcactctccacttccccagccatgtgaataagttatggcctggttttacaaacaacaaaacaacttggagttaatattcactagtcgaaagtatttgaacaaggcatgctatctctgggctcaagttttatcatctggattttgggagtgatatcacagacggttgccatggggttgtaggaagactaaatccttctttattttggattatacatttatgaaaaaggatacatgtttcaatgttggccccaacgatatagccagttacatcaaagttgatccgaataaatttgccctgaaaataaattaaaaagagaaaattgaaaataagtaagtacatactggatatgaacactaataaactaagaagacaacaagtatccatgaattagttacaataatggatcttatatattgcctcaaacaaaaagaaaaaagaagaaaacaggctgtgatacatttcaaaaaagtagcaacagaataggctattttcctggactataacataataaaattagaaattattaataaaagaaagtagtgagatcccagtcattcagaagtttttaaaagctcttctaaataatctgaaatatgagagattttaatagttttaaaggaccactctatccagcactataatggtagatttaaaaatctgaatagtataaatgatttcctagaaaaatagaaatccattcaagaaaaaaaaaacccgaaaacttaacccataaaaataaaaaatagtgaaacagaattatttctttaaaaatgctggattagtcttatgaaacaattttacaaatttctaaggaatatttgatttctttactatacataactgttttagggaaagaggaaaatcgtgattatttcatcattcattttataaagttgtcataacactgagtacccaatctgataaagatattacaaggaaagcaagctgggcgtgctgactcacacctgtaatcccagcactttgggaggccaa[135 bp omitted]agaggccagagagtcacttgaacccaggaggcggaggttgcagtgaactgagatcgcgccactgcactccagcctgggtgacagagcgagactccatctcaaagcaaaataaaagcaaatatggtatggttatatcttacttataaaaatatatataaggagaatcgcttgaacccgggaggcggaggttgcagtgagccgagatcacaccactgcactccagcctggtgacagagtgagactctgtctcaaaaaagaaaaaaaaagaaacaagaaaaaaaaattaaacatgttaaacattttgcaaaacaaacataatgatcaagaatggtttattctaggactgctaagaaggactgacactagtaaacataccagtattattcatcatataaacagtcaagggattggagggcttcctttgaggaaactgacaagctgtctcaagtttattgggaaatcgaaaaggacttagactaatcacaacaattctgagaaagaagaccagggctgggggaatcacactacttgatttcaaaaagctataaatttactaggacagtgtggtattggtgtaaagacagagatacagattagtgaaacagaagacagtccaggaattgatcatgtatgtaagttaattcatttcaacaaatgtgtcaaggtaatttaatagggaaaggaaggacagtcttttcaataaatggtgcttgaaaaatatgcaaaatgaaacaaaacaaaattaaaggaacctagacttttaccttacactacatataaaacttaactcaaagcagatcacatacctaaatacatgggctaaaactataaaacttctcaaagcaaacaggagaaaatcttcatgaccttaaattagacaaggatttcctagacagaatgcaaaaagcatgaaccataaaattaaaaactggtaaaatggatttcatcaaaatttaaaacttttattcttcaaaagataccacaaagaaaatgaagagaagccacaaactgggagataatatttgggaaacacatgtgataaaaggcttgttgccagaatatacaaagaactcttatatttcaatagtaggacaaacaacccaataagaaaacagggtaagtgatttgaatagacacttcatcacaaaagatatgtgaatggccaacaagtatatgaaaagatgtacactatcattagttattagggaaatctaagtaaaaacagccacgatgagacaccactatatacccactagagtggctacacattttaagaaagactagcaaagatacagaataactagaactatcagacaaccctggtgagaaggcaaaacggtacagccagtttgccagtttctcacggcgtcaaacacagattactctatgacccagcaattccattcctgggcggggtttcacccacgagaaaggaatgcatgcatccacatggacttgtacatgaatgtccccagccactttattcttaatagccctaaactggaaacaacccaatgtccaccaactggtgaatggatgaagaaatcgtggtatattcacaaaatggaacactactgagcgatgacaaggaataaaccagggacacacccaacaacgtggatggatctaaaaagcattctgctgtgtgaaagaaactagacataaagcactacatactatatgattccatgtacttgacatgccagacgttactgaaaactctagggacagaaacaggtcagtggtttcaggggcaggggcaggaggagggaactgacaacacaaaggcaaaagaaacctttctggagtaagggaaacattcttcctctagagcatggtgctcactacactacgtacacatttatctaaacgcactgaactgtacactgaaaaaggtgaattttattgtatgccaacatttcaaaaacaatcaagggagagatcttaggaactcctagataaatgccaattttaaaaatataactcaacatctgttttagacagatgagcatggcccctgtgctaggatgacattcggatctgtgaagcattctataacataataataattcaattctgtgtatttactataaacatattaagttaaatatgcttccctattaaagtgaaagccgttagatttacactcttctgcttatggtgccaggcagcttgcccatccttttacttacgactttagggcccttctcacccttcccaaagtgttactttttccagtgtattaatatttaccttatattaaaaaaatgagtagtcagtttgggatgctacctactaaagaagttcctcagctatattttattgtatgcaaattacacctcaatagttgattttaaaaaaagaaaagaggaatcactttctaaaatgaataatccattgtatttttgctcaatattatgagcattcattaagaactcaccccattttcctattaaaaaaaacccaaaccaagctagcaaacaaggtgaaagggaatgtgtgtggggagtgtgggggaagagccctgggaatacactgacttcctgcttgaggaggaacaaactgtgatcagcttgcaggattaagttctatctcaggtgtgtgtcaaggagctcctttagcactcctggttctctttccaagtgtcctaactctgccccaccaaaatgtacctattctatttcacgttatctgacagcacggctttgcactaagaaatacttgacgagcttgatatactcaggcactatgtcgtcatcacaacagaggtgcattccatgaagggccagctcccagtgccactaaaccacggagtgttcaagagggagttggagtaagaagcaaaggcattttgtgacaaacaggctcttgctacatcttacaaagtcatgaacaaaaaaaccactgatgctacataagttatcaaaacaaatggcaaaaacaatattactctggacatgagtctaacacacgtgacagtgaaagtcgacaatgtaataaaagatatgaatttaggatttctttagaagttaggatggtgttagtcaccaaacctgcaatgccctctagcctagatactgattttatgccatcaaatttactgaggtaatgatttaaattcccctggagaccacaaggcaaatccatcattatgaggctgcttgactatcagtggtgagcatttagtatttttcttctatagagaccttgttaattaagagtcgcataataaaactgacaatttgtttagttagttttgttttatggtgtggagagaaagttttgtttggatttttgttttaataggagaaaaattttcccttctttgagataggctaaacaaataagcactctacacaaataatataattattggcatgaagagatgctgacctaatgctccccaaacttaagatgaacactgaggctgtgctttttcaacatctgaagaacaatgtggtctgtgcacttccacacatagcacagaggtgctatgggaacatagagaaaggaggagagaaggcttcacagaaacagtgccagccgagcctaccaatcttagtgtttaccacatacattagctgcttcaagctaaatggtatttcaaagataggtgctgtgcttaagttcacttgaaaaaaacaaacaaaaaaaagcaaaacaaaaacaaaaacactacaaagagtaggagtccttggcacactgcaatctaatttcaacttctaagttgtaacatctactatgttgaagagatacaacattctgggttaatagctattcgagatagcaactgtaggcacccttctctcttctgccagtaggctcttacttattattgcctttgcattgtcagaatgcaatagttgaatatacaaaattctgatagctcatattttgttgacaagagaaagatcttttttgctctgtaattataaaacattttcatctttagatttgtaagcatcaattagaatggtcaacccaatgacttctctcattttatattatctatttccttctaacaattttcacatacacacctgctttctgcatttgtccacttatgaaacttatccaggtacatattggtacagaaacatcatacaagattaaagaatactgttattttagcaaagagatgaaataacagtattctttaatcttattgcaaaatactaaggaaaatcttcctacagaatgaccacctggatgctaatgtcatgtttcttttttgcccttagaaatatatataattcttaagtttgagaaaattctaggctatcacctggagactcaatctgagactctctttatataattgatttcatcatcatctttacagtctaccatgctatctgtctctttgtattcatcttccggttcatccaatgtttgtgaaatgtttttctgtcaatttccttctcactgacataatgactagaaattgaaaacttctgatttttcaactatgttcactaaaagctaaaaataacctacaaagatggtttctctagttttctttcatacctacttgaaagacaatgcaatatttggggtgatataataaataaattaaaagatgaagcaatagttattactgtagcatccttctaggcaatcccattattcttattattttattcttttttttagcatagttgagaataaatgagttaataatgaatcaatttctaagatgacaaaacagcaaactatttcaagacacagaaacaaataagatcactaatactccataatgtatcttagatttacaaaatgcttcaatggacccatatgtaattacaagagagaatgaacttcattctattttaaaaataagtatattttgtctttgttttttggaagacccctaagaaagatttaagttaaaaagctatcaatcctatgaatagttagaactgttcaaaaaagaaactgaaattgggtcctgatgttatactgatggttaaaattctccacaaataattttaaacagctgtattatctatacactacctcattgagttaataaaaatattgctattttaagagacagtagtcaaaaggcaatgttattaccacagagctgctaaggacacacggccaacgtgactgcctgggcaaatgcgttctcaaacttctcattttaattctgcggaaaggttcatcaaaatcatatggtatcacctagttcttattttaagaaaacatttcactaaaaaaaaattctttatatccagtaatataaacttttagctttcaccaacatgtatgtttaacttctttattaagtatatatatatcaacatgcggtttaagctttcaactccgaatactatttcctttttttttctttaccacctcaaataaattagaagtttgaaattcatcaaacaaaactaattctttatttgggcaatatgataacattaatacacagataactttgaattctagcaactgtaaaatctaaacttaaatgttatttaccgtatatttagtgaatttatttttccctaccttcacgggacattaaaataggaaaggaagttaggttcaaaggagaaatggggctttgtagtcatcgctgccacctgaagccacctgcctctagccatggtcaacgccactgtgttcttttgacatcattgttgatggtaactcctttggcccatgcagctccttcgagctgtttgccgacaaagttccaaaaacagtggaaaactttcgtgcactgagcactggaggaaaaggatttggttataagggttcctgctttcacagaattattccagggtttattttatctgccagagtgctgacttcacacaccataataatgccagtccatctaccaggagaaatttgatgatgagaacttcatcctgaagcacacaggtcctggcatcttgtccatggcaaatgctggcccgacacaaatggttcccagtttttcacctgtgtggccaagactgagtggctggatggcaagcacaaggtctttggcaaagtgagaagagggagtgaatatcatggaagccatggagtgctctgggtccgggaatggtgagactggcaagaagatcaccactgccaactgcggacaactctaatcaatctgcttgtgtttgatcttaaccaccaaatcattctttctgtagctcaggagagcatccctccatcccacttgctcacaatatcctgtaatctttgtggtctcactgcagttctttggtttccttattcccctcgacatcaagctggattgtagttaagtttaggattataaaataaaaactcagtaacaaaaacaaacaaaggagaaatgggagaaaattaagatttggggcctctcctctccggtccgtgcctccaagatgacaaagaaaagaaggaacaaaggtcgtgctgaaaagggccgcggccacgtgcaggctattcgctgcactaactgtgcccgatgcatgcccaaggacaaggccattaagaaattcgtcattcgaaacacagtggaggccgcagcagtcaggggcattctgaagcaagtgtcttcgatgcctatgtgcttcccaagctgtgtgtgaagctacattaccgtgtgagttgtgcaattcacagcaaagtagtcaggaatcgatctcgtgaagcccgcaaggaccgaacacccccaccccgatttagacctgcgggtgctgccccatgtctcccaccaaagcccatgtaaggagctgagttcttaaagactgaagacagactattctctggagaaaaataaaatggaaattgtacttaaaaaaaaaaaaaaaagatttggggcctctgaacaggtgagctgtagagaaatgttccaaaataattcagacatgtggtcacttacttagataaataagcaaagtcaccaacatgcaacactctattcctcatcagttccctagcttggtgtccttttcacacctagggtccatagtggcactagccatgatagtgagtgccagtgaaatatctttcggctagatgcaaagggccaagcaaagagcagtgaaagaagagatgcatggagaacaatgatgaaggagacagggctgcaggggcctgtggtgtggaaggaggcaaaagagaacggtatttctgaaaatatatttggtaaccaataaatctcagttataagccaaagcactaacatgtattctattttaaaaacactttaacaaaacaaaaaccttatgaagttgaaaattatcaactttctagctaaatgacactcatactcagatattttacaagacatagccaagcactttgacaacctgacaaagtgaaatttcagaagcaaaaatgaaaaactttactgaatatccccaagtgatctaggacttagattattccccttcatgttggatacgctggcaaatcaggtaagatgcaggccatgggacctgacgtcacttgagtgttggccacttggccagataagcaaaggtgacttttctttcttccttggcggcaggccgaggggagagaatatctgttaaaagttaaaaaagctttctcctcacatctataataaatactttcagaattaacatttttattgaaacacacatctagactaaattggaaaatacgagttttacttttaagtgggaacgctatctttaaacattatgtgaagaaatctgtgccgaaaatgcccactccataattgatttgcataaaggtcagattatggtacttagaatattcaatcggaacttcaccagtaaaaacaaaagcatggaaaacccccaaaacgtgacaagtaccttgtgtattaattacagctacacattttgataacgcttattgtataccaatccagaaacaagtgaaattacacgtgtactgtgagagctctcaacagcaaagacaactagaattctctcatatataatcaaatataacttgttaaggatttcactcaaaatgtgcaatagggaaacccggatatttgatattttcataccctgaagaaaataaaatgaaaattatcttaattagtttcaaaaattttgtttgttctgaattgacatcgatttctagaatcttttctggggtgattataatgtatctatagtaactaaaactagattagttattagttagcaacttaatttaggggcaatgcaggtttgtttcatattctgaacatattttcccccttcttaatttggcatctaaagttattacatgatctgcagtatgcattaaaacacatcagcacagatagggtgctatgcatgtgtgttagctatttgccctaaatgagaaaatccattctaggagtaatgagctagcacttaatccaaaggccagatggccaccttaaatgctttagctatcttaatctccaaaccaaaccagaagctttgttgttagtaaaatgagttttcacatgcactaagtggcctcattacttagtataatggatattagaaatcactagggtaacatgagtggcattaagccatggactgattagaaagagatatatattaacttcaaatagagccttaaaaaaagataaatacataaataaaaacaaagaaagatatatatagaccctccccaatccggggtcaagggaacaagtgttgagactccagcaagtccaggaggctgtattgttgggggtgctcctagagcttgatactaaatggctgtgtgcagccagtgatctggaagatgctggttgcctggtgcagaccatattctgtcactgatactgtcacatttgcctcagtaaatctttcaggtaaacgtttggttagagaaattaaacagagctgggctgcatgcaacttacaaaactgttttcagcaactgccttttgataaatagatatgagggtgcagaatccggacgtgctttcattataacctggtcgccaaactgtaaggaggatgcctagagcccttacctagctttaactgctggaggatacttatctaccaagaggtacataatagttggaaattgccagcctggcttaagtcaacttggaaaaaaaaaaaaaaaagagagagagaaagaaaataaaaggaaagaaaagaaggatttgtggaaatagagaaagtgattctaactaaaactctgtgagggaagatgtacctgctgatccaaacaatcattttgaaattgaagtccctgtttttaaagtttcattatgagagattctttttacataaatctcctccatctggaacgcattttacttctccataaacagagaactggactaactgtgaacgattattttcttaagggtaatgctctcctaaataaagaatccctttaatataaaccatatgctagtatctttgaaagaaaagatattcttcaggaaattagtcgtctatatcagatcaaagaaatggaaccaaatggattctaaagcttatggagtttatagcctcaaatattttcactgtaagcatgtagcttataaatatgactgcatgaaatttcactgtatacacaactcattttttaacatcgtactactcttggtatgacattgatctcaacccaaggcctggcctgcccacggagcaactgcctccctcatgttctctacccttgcttctaaaatgggggcatgcatattctcagaggatctagcatatgcactaccttccccgagctcaacaacatcatgacatgccgttgaaaacatattaaagttaacaccaatatgaaggtgtgctctacagggctagggaaccttagttttgaccactggtatattcccagggcctggaagagtgtatggcactttgtagtgtctgccacattttcagtaaatgaattccataaaatccataaatatacctgtggggcactatgctaggaaccaaagatacaaagtccctactgacaaagatcttagacattctactaggaaagataataaatacacaaagtaattagttacagcttgtgataggtgccatgagggaaataaacaggatactgtgatagagaataatagaagaaatatcctcagatatggttttagactaactagctagttaggagaagaaatgtggacagatctgaaacaccttctagatgtttaaccaacaggattcactgttggcctggacgtgggccatgagaaaaaggctgattcctaggtattttgtctttctaggttttgctattgcttttattttaagtttaaccaactgggtgatttcataataccatctattgatgtaagacataaaggaacaaattttgaaaggaaaggaaaaactttcatttggaatatgttaaacttcaagaatctattgacatccatttggagatatcaattaagctgcacagtggctggcaaataataggtgcttaataattaaaagaactaaataacaaatcaaacatcaaaattacacagaattgaatttaaaaatgagtctacaacagtttctttcaaaccccaagaaccaacaccaatagataaatattaaaggggaattttaactgaacattatttaatcaatggacctaattatttttaatggagctactgagatcaactacttgttttagtactgtgtaggtaacaccttatgataacagtagatagcaataaactattactaaaaaaaatacgtatcaataaaagttgactttctaagaattaaagcccaaagtaaacaatttaaagatatctctgtttcttggtcgaattgaaagctacgtctaagaacaatgccctaataaaaaatcttttttctactaaaaacaaatcagcttttactatattagaatgcacttattatatagtagtgcaggcactttggaaggtggcacttcagctgaaatagcatttgttgaacatttggattcaatggctaattcctgcttctttcctgtgtgctgcttccaggtggctagaaaacaatctaattcttcctaccagcagaatgtaaaataggtttctatcagacttgattgtcaacctttggaataggatgtatacataacaagcattaaatagactcatgtattactttgcaaataaatttcagaaaataattaccttaatttagactataatttgaaggaacgatctagagcagggtttctcgatcttagcataactggtattttgggctcaataattctaagcggtggggactgtgccatgcattggatggtatttagcagcatccttggcctctaccaactagatgccagtggcacaccactacccaatctcccagttaaacaaagaaagatgtctccagacaccgccaacgtcccttggggaacctccaattaagaaccactgacctagagtcactccagttacaggttaaaaccctacatacatcaatgatggaaatcactgtaaggattcatagtagccatgatagccaagaccacctcaatgatccccacctctggtattcacagttccctcccacacagtatcagggttggtttgtataaccaatagaagacaatagaagaaggcatgtgatttccaaggcagagtgtgtaacttctgtctttctcttggatcacttgctctgggagaagctggctgccatgtcatggcaacattcaaggagccctatggagaggctgcctccaaagccaggaactgaggcctccagccaagagccatgtaggatagggacctcccaccaagagctacctgaggaagatttgaaggagatcctcccacctcagtcaggccttcagatgactacagctgtagccaacatctcagtgacgacctcctaagagaccctgggccagagtcacccagctaagctgctactgactttctgacacacagaaaccatgagataatcgatgcctgaagccaccaggttttaggatcatttgttacgtagcaactgataactaatatagaattatatctgtccaaacactaaaataatgagttgaaacacaccctggcagggggataaatccttacacttcgtaacagaaccactacattctttacccaaggacacaaatgacggcttagtagcaatttatcttttccaggaaaaagcggggccactgagcaccaaaactgtctctcttgaatttagggtatggtttgagggctgggggtgggggaaacagaatagattagtaacttgatttctgtggtaagataaacaattttccacaaagaagtccttgaagatcttgatggagattcacataccaaagctggcagctcactgttccttctttcctgtgatatagccactaaacacagggcatttcagtaggaaaatttcagatttagttgtggctcaggctcaatggggatgatccaggagagtgacggaaagtctgaaggaatgcagtttcctcagatcgtttctaaacccacgagtcaagtcacaggcatgcctcctactgacacaggcacatttgttaacccactttgcacataaaaagctaaattaattactaaatgaacttggattaagtgaatcttcaaattttatcttcctgggaataaacaatattccaagaaaatacatccctatttcttacataacttggaaagcgtcttgcactgaaactatctctgaaggtgctatgggctgaaatgcgtccctgcacaaattcctgtgttgaagtcctaacccccaggacctcatgatggaactgtaattaggaagagggtctttaaagaagtcattacattaaaaaagggtcattagggtgcaccctacttcaatataattggtgtcctcataagaagagattaggacacagacacacacagagggaaggccacgtgaagacatagggagaatacaaccatctataagccaaagaaagagtgcacagtgaatcagcaagagaactaacataaccaactccatttttgtttaaggggcctttacccattcctgcacatggacaaggataattttagagcactgagataatatgcaaaaacagcaatcaggtagtttttaaaactaactctgagattaaaggagaagtgtgtgaacaactatgtttcgttaaagattgatgagagcactgtgacttgactaaggacaaggatattcccaacctccttggacccttgccggcgcccagatgtctgtggtcgtcagttacctcttcatcccaaccctctccccttccccctgccttaacataaaaacagcctaaaatgtgttctgacttcagagggtcctctgggacgctagtccaccatcatcttcgtttgctggctctccagataaacctgcttttcctcccaccaactctcgtctctcgtgggtggctttcaagtggcacgcagccgaacttgggttcagttatgagaggcctcagaagaaaccaatcctgccaacaccttgcttcagacatctagcctccagaattgtggaaaagtacatttctattgtttatgctgctcccagtctgtggtacttttatatcgcagccctagtgaactaatccagagggctttatggttgcccttgtgtttgctgggtcctctgtgatcctgaatctggtcgcttccactaatcatagcaaccacaccatcggtaaattaatgtgcagaccatgatgttatctcaattttaaaaagcgtgtcacgacgacactagatcccccaaattatccatcaatgaactgctagaactgaggtctcttactctggcgttcttgacttttaccaatacttcagagcagggagaaaaaaaagggaagaattaatttgaacaacttaagtggaaataattgaacaatgaagtccttcttcaatctaacagtggaaggggtttctgaaacttgatgaccataatccagggcaaaagacttactggaggaatgtccgttgtgttgaatatgggtttagagatgatttgctgtgacagtgttgaaggtgagcagctggggtggaaaggggcagtgtctctgacgtaacagagacctggccatcacttaggataacattctcaggtgaacaggtacagctagtcaaactgaggaggaaagtaaagctttcaagttgaatagctaaggagaatttttaggctgggtgtggtggctcattcctgtaatcccagtactttgggaggctgaggcttccagcgatcctcttgcctcagcctcccaaagtactggacaacatagtgagaccctagtctctaaaaaaaaaaaagttactcttttaaattagcctggtgaagtaacgtgagcctgtagtcccggctccttgggagactgaggaaggaggatgccttgagaccaggagttggtggctgcagtgagctatgactgtgccactgcactccaggctgggtgacagagcaagaccctgtctcaaaaaaaaaaaaaaattaaagagaagtcatagtagtgacaaattattccaaagtccaaatcccacagaaaatagcaaggtaggaaaaggtcagtttaccacatctaatgcgttgaatgtttactatgcatagtgccgggctaagtgctcagcgtgcacaccatttattctctactccgattccactgacaggtgttattatcatgcccaatcaaagataaataagctcagagaggttaaattacatatccataaaataagacagagttatacatttctgtatgataaaatgatgaaagttacttacacattaccttttttcttttcaaatgtgactactagaaaatttaaaattacatgtgagcttgtattatgtctacagaactacatctattagcttcttaaaatctaggaagaaaagtaattcatttgcttaatcacagtaaacatttaactagaaatctaaggaattaaaagcttctggtgctttgaaacttacaaaacgagatgagttatcatttttcacagtcttcgcatttccaaatgattccagaattggatttgcttgcaaaagctgccgttcaagttccccctaaaagacattacacacacacaaataaaagcagatgtacgttaatctaatgtctttactcaagtcatcaggggaaaaatttctaaaaaagaaactgcatcttttcctcagttctttcattctgtctgccatccagcaacttttgttggcttcttaatcctggttatgataatggactccactaaaggaaaaaattagcatctataaagtggtcacaaggagaaaaaaatgtcacgctgaacagagaagatcaacttaagcatggggcacgtaaatcaggcagagaattttgaaaataaaacagactggctttcatgaaatgaaatttagcacgacacttcaattaagaacatattaatacttgtttattttaactctgccttatttgaaaactttaaggcagttaatttaacagttaccactgtattgatgtagcactttccagttttccaaggagtttcatatactatctctatcatatagacagggcaatgtcttcacctccactttcagaggatggtaaagacgttgatgctgctaacttgctcagatttaaaaggctaagtagagaggattcggtaaaatgtctgctttagttggtgtctttacttatatgtaaattaggctataaaacagattttacaaacaaaaggtggaaatatattaatacgtactttaatcatgaaacacaatagaaagctgtatgagaaagcatgatgccatttctggccatgaaaagcaccagaagtgatgctgtgtttctggaatgtaatttcagaattatattttatgacttaaataaacctgctttttccaaacataaatcttacccctatattttaaaatacccacagtattttagacctaaagaaaaactaaataaaagctgctaggaaatgcgatactctaagcaaaaaagatgaatataaagaacctcacatgaggcttttaaattagtggcatttggtatgtgatgcactccatcaccatcaaattcaaaaaaaagaacaaatatatgtcatccgtacagttctgtcacgccgccctggtgtggactgtcactcagctgaaagggtggggaagtgttcctcaggcacattacacaggaaggggacctgctctgcctacatccattacagcatgatctggactatccgcatgttcataggtcttaactacaatctacaaccgtgttcaactgaagccagtcaggaaccagtcttgtcaagaacctcaagctacgtggatgtcattacatggcatcggtttattttcttggcattagacagtttcctccctgtacaacaaatcttctgttttcctcacttcaaaacccttaccaga[270 bp omitted]tgccaaactgtcttaagcatggtatcctgaacaactttgatgactgagagccattgttaaaaatgccagtcaggggccaggcgcggtggcttatgcctgtaatcccaaaactttgcgaggccaaggcaggcggatcatgaagtcaggagatcgagaccatcctggctaacacagtgaaacctgtctctactaaaaatacagaaaaattagccgggtgtggtggcgggtgcctgaggcaggagaatcgcttgaaccgaggaggcagaggttgcaatgagcagagatcgcaccactgcactccagcctgggagaaagagcgagagactcatctccaaaaaataaaaaataaaaattaaaaatgtcagtcattattcggtgatagactgccttcctccacccccccggggtcagcagtcagttccatcagcattcctatgaccaatatcttgcaaagcccttggtatactcactttgcattaactgtttgggtctctaaaagcctttttttttttaaacctaattcaatctatgtgatgagaatgtggaaacttggaaaaacactggcattctagtaagtgggacattaccttaatactaaatatctactgctagactttggattccttaaaatcacacaccatcctaccaaatcataagaaaaagactttgatagtccatctttaaagagttttcctaacttggaggtaaaaccagtaatgcatatcttactttaatattacttagatatggctaaaaggattatttgagtcaaattttctattggttcttttcttttcctctctgtgtgtgtgtgtgtgtgtgtgtgtgtgtgagtgagagagagagagagagagagagagagatccactgattctattcttcttgtgttggcttcaagtaacctggttgtatcccctgtgcctaactcggtcagtatcaggtcaaaatgatgcttggcaaatgctttgctgaatgaatgtataatcagaggttccacgggtgtccaactctttaaatgtgaggacattttttgcttatctgtgatggtggatatcatgaaaattatgcacaaacctttttttcttaaatagctcatcagctatcgttagtgtattttatgcatagctcaggacaatttttcttcttccagtgtggcccagggaagccaaaaggttggaacccagaattctagaactatttggggaggggatggtggtgagccaaaggcagcaagaagatttatgggtcctcagagtcaccatggtaatggtggactcaggcactcctccgtccctgttgctggtcccactacattgatagtgtcatggtatcactcctactaatggatttgtggacattggtgagactgagtaacgatctcaaaaactccccaaatgaatccccaaaaacctggtacaaagccaattatcataacatatagaaattaacatgagataatttctgtgttgaacaatttcataattagataaatggtgctaacagatctcaaccaaattatgaaggcatttgtaaaccatcagggggcagtgactatttacttttcctctagaattggatgggcaatgtcccttgtttctattctataatgttattttggaatgtagaaaacaagcagccttagctattgaaatgatttttaaagttctaaatatttagagttatatactgctttcaaagtttaccagtcatagtgaaaattacactcctgggtttattacatagtatataatatacacttgctatatgatatagcatgagttcgaaatggttaaaaatatatacctctttcaaaagtccagttcagcccgcaaggggactcaggctgagatccggctgtaccttgcaggcctggcagggcagagctgcaggaaggttaaaagcaggcagcagcaaccaaccacatgttgaaaaccagactctaatctcaactggcaggctctctatcacctttctgtcttggttcagcacagtttaaaccaggttggagaaagatacaaagtcatcctgaagatgactggaaacacagggagacaagtgggctggcttgaaggtatcatttgtaggggacggtcaagtttaagaacttaatcgattattttcaaatctgctctgaaattgcactatgttgaggctttgtgaactctgtgctagactttgagggtctctaagagcaacctctcttgaggaaagagggcacacagaagctgtacttgcagtcggctggtggatactaaggggatatagccaaataagacctttaattttgttataaaaagtacaccaaaagttcatagataaatgtttatttcaagttaagtattgtcactttaattttgaaaactgatttgcttatatttgttcatattttgaaaatgaagatgaaatttaaaaggtaaacataaaagactgaccacaccgctcactaggatggctttaataaaaacacagacaatgccaagtgccaatgaggatatggagaaactggaactctcacatgttcctggtggcaatgtcaaatggtgcagtctctttaaaaatgtttaacagaattaccgtatgacccagcaattttacctctaggtagctacctaagaaaaatgaaaacatatgttctcaccataacttgtacatgagtgttcacagcagcattaattacaatggccaaaaagtagaaaaaaatccatatccattcactgatgaatggataaacagaacgtgacacatatttaatattatggaatattatttggccataaaaaggaatgaagtacttatatgtgctagaatctggatgaaccttgaatatattatgctaaaagaaagaaccgtcagggaggaccacatattatatgattccattcacacgaaatgtctagaatacgcaaatacatagagacagaaagtagattagtgcttgccaggggctgaggggaaatggcaggtgactgctaatgggtatggagtttcttttggggtgaggaaaatgttctaaaattgattatgataataattgcataaagtgaatatactaaaaacactaaattgtacacttccaatgggtacattgaatggtatgtgaattatatctcatttaaattgtttcaaaaaaagaatgagtagataaacaagcaaatatataaaggactgacaaaatcaggagcctagaaatgccctcccctttgggtttacaattcatactaccgtttagtgataaaatgctggatgtacactcatggttcctcgggattcaacttttgcttataaagttcaatgtaaaatcacaaaccagtggtatcaaatcaaccaaaagaaactgtaaccttggaaagtacagacttttcacactgtaactataactttaaggcaatcattcaagttgggtgaagaagtcgcagacagggacacccagcagggggagaagtaacttcttgaatggtacccttccacggtgtgaccattccgtacggtgctgttaagtatttcacgttcctcagttgtgttggggaagaaaaattgagaacgagtattcttctaatatttctaaaaacatcagcatagctactgcttaactacgattaaaatcaacttgggaaaagcagcactgaagattgtgtgcacagtggacacatgcagtacgacatgcaaatcggcaatgaccgggaagcatggcccaaagaagctgctgccttctttgggagaacctgcttcccagggattgatttgactcaaagtaaaatctaggtgggggtaggcatgctactcacatacaacagggatccactctgtagtttaaaatgacatcgaaacaaaatgttaacaacaatgatttatgtgttccacagggaatttggaaaacctaaatctgtgtattaattgcttaacattatttcaatagcgacacaagtacaaattaaaaggacatttagcaagtacctctaaagcataaagaaaaactggtttctggtccagattttccttctttaattggcaaagaagcttttaaataccctacaggataatgactatttcatttaccctcttcatttgtatcactggtctattctgcagctaaaggagcaaaaggacatcataggccttcataggtacagtacagcttgggtggctggcaatctcttaagaatcttaagtaaggtatcttaaaatctcagtgtctatgacaattccttagatatttatgattatttctttatattaacagatcatttccataactcgatattattgtttcttgctttatatcagctttatatcattatgtttgtggaagaccaaccaaaaccattcccatgctagggaaaggattaaatccaagtatagatgtcctactctatccaaggtatctggctcaggtctgccctccttctcctcccaggtagtgagaaatggaggtcatgctatgattcttgcttttttcactgctatggtctgtggagctaaaaggcaggcatctgataactaggaagaataacagtcttccactacttgcccagcattaagaaaattgtaattgattttattttacttatttatagagatgaggtcttgctccgttgcccaggctggagcacagttgtgtgatcatagctcactgcagcctcaaatacctgggctcaggccttctgtctcagcctcccaaacagctgggactataggtgcataccactgtgcccagctctaatttattttatatattaaatataattgggcctttggtttaaaacacatacaggcataaactatgccatgccataaaactttaacagatcagaaatttgttagctctaaaggtataatttttaaaggggcagccccaaattcaaaatgtagtgtagggcacaaagctaggtttccatgtgtctgataagtattaaaataattccacctagtaaatgacatatgaaaccataatttataggcttcataaacatgcagttcaatgtcatgataaaagggcaaataaatattaaaatttattgagaaaacaaatttaaagcaaaacggcatgcgcttctcaagaaagaataaggctctaagcaataaattttcaaaattaaaattttttaatgacagatttcacttagaactagtggcatttgattctagcagagactcaatctacagacagaaattagtgcaaacactcaagactaagaagcataaagaagagcacttgcctggtgtttcactggtttaggcgattcctgctgttcattacaaacagacaaatgcaaatgttagcaagtttgagtctttgcctagcagtaagccatttccaaagcaccaagccaatgtgcagttgagaactgtggaagctgggttggctggcgttctctcaggctgtattaactaccacttctgcatgtctaaaaattaaggagaactgacatttctattcttgccctttttctgtcatcacttcttcccatatctctaccctcccctcaagctgctgtgggtagtagcaagaggctactgcaagttcagaaagaactgctgaacaattctcagcaaatctttgcaagaaattaggcatcaagccacaaccataattccagtttgccctgtcagaaaacctctttaacagcaatttccttgtatcctagcctctggggtggaaaaaagcattgctgggtaggtggcggggagcaggtggagacaagggagctgtcagttatagcagtgtggagagtagactggcttccttatttttgtttctgaaattataaaagaagaagaagatttaaaaaacaacagagcagaaacttacaggaatattatggtcctttcttcctttatgtgaagaagcaacatgggcaaggtactgaataactttctttgtattttctgtcttcccagcacctgactcacccctgaaagaaagagttaatataggctgctttaacgaaagcacagcacatgcattccaaaattacaactgataaaattaaattgtattggaacaataattaataaaaataaaaagaataaatagaaaaaataactatcagcagtagttagaaaagaaaatcatccttgtaagaggtattaaataataaacccaaataattcttttttttctttgagacagagtctcactctgctgcccgggctggagtgcagtggcgcgatcttggctcactgcaacgtctgtctcccggcttcaaggaatttttgtgcctcagcctcctaagtagctgggattacatgcacacaccaccatgcccggctaattcttatatttttagtagagatggggtttcaccatgttggccaggctggtctcgaactcctggcctcaagtgatctgctcaccttggccttttaaagcactgggattacgggcctgagccactgtgcccagccaacccaaatatttcttgatagatgccagtaagaggacacaggaaaatgttcacgacactcttttttcccttgggggtgggggggttctaccagagaagtgaaatttattagaacattcatgaagaaaactcctcagtaccataaacatatctggcactgcaaacagagaatccctaaaacaattaaattaatatgatttaatctgaagcagctgaaagaactctgagatgcctgctggtattgatactcatcttcaaagccactgaaagctttctcagatccccctctcagagcaggctagtgacgattcacttcctggtgccagtgttgtgcctcataggctgggttcctgatggcaggggctatagcctcatatatttatttatttgtgttttgtttctttctttctttctttttttttttttttttgagacaaagtcttgctctgttgcccaggctggagcacagtggcatgatctcggctcattacaacctctgcctcctgggttcaaacaattctcctgcctcagcttcccaagtagctaggaccataggcacacgccaccacgcctggctaagtttttgtatttttagtagagacagggtctagccatgttggctaggctggtctcaaacccctgacctcaagtgatccacctgcccagcctgtgttttgtttctttttaatccttgtaactttttccagtgttgacacataggcagacgtaatttgttgtcaaaatgagtaaatactatgaattttgttgtgaatgaggacaaatgccaccattttaaatgattcatatttacaagcaaggctggcacatttcaaaagttttcatttctactcactactaggcttgaaattcagacaagctgctacacacacagcgagacctgaattacggcctctgctcaaacactgaagctcccctaagacgtgatcaaagcaaacctaactttacagtcaacaaaattctcaatttggattataagaaaaatttcaatatctaattaatttttctttaaaaaaaacaccccaaactcaaaaatgttattatataccttgccaacgaataatcctctaagcatttaatctaaggattgaaaatctaatttttctaacaaagctggactctttcttggaattgtacttagaattgcactatttgggccggccacaggggctcatcctgggactttgggatgccaaggccggagaatcgctttagcccaagagttcaagatcagccaaggcagcataatgagacccacatctacaaaaaaaacacaacaaatcagctgggtgtggtaactcccacctgtagtcccagctactcaggaggctgaggtgggaagatctctcgagcctaggaagttgaggctgcagtgagctgtgattgtgccactgcaccccagcctgggcaacagagcaagaccctgtctaaaaaaaaaaaaaaaattgtactatttgaagtgtccaaaacttaaatttttcggtagtttactgaaaaattactggttgcattatcttcttaactctgcacccagataaccacaaactcaaccgcagggaagactgggtgaaggaaccctagtgaccaactgtttgcctcagtaaagaaattttcttctctgggcctcagtatcccaaatctgtaaaatgcaggcattggattagatcctttctagctccaagagctgacaattctagatataacccacttaatggtttataagactatttcctatgtgaagcttattaaccacccctcatgttatcgtaacattagttcccttctgatttgccacccacaagtgtttgaatcttaggtactccaatctaccaaacttttattttaaggtttctgcccactattcatgctaaaagaggcctttctggcaaccaagattacatcaatctgtactctcatttttatatcatctgtattattaaatccatctgttgttttcttttacaagtttgatagcttcactttttacagctgaatcttcaacctgaaaaaaattttatgatttcaggtaagaatttaatctaattgtttcccctagatgattcagcccacctcccaatatcaatgactgacaaagacattcattctcaggtgatataaaatgttatcttttagacaggcatggtggcgggcgcctgtaatcccagctactcgggaggttgaggcaggagaattgcttgaacctgggaaatggaggctgcagtaagccaagatcttgccactgcactcaagcctgggcgacagagcgagacttcacctgaaaaaaaaaaagttatctttttcttattccccatacctgtggcatacttccaagccagcaccatattcagtcgttctgaaacgtgactaaccagagcacccaccatcatccttctttttgaaaagagcaaaaagaaatcaagtagacgctgaggttttttttttaggtaaacttcaaatagtttttttctgttatctcttccccatctccctgcctcccaaataaaaaacgacaggtagaattttgagttaagtggtatcaatattcatcttattttttttttttttaggagaaatgatgtcttcatccctgtgtctcccaggtataagttttgtatttttctaagttcaaaacaagcaaggatcatgtttgccttatttatccttaaaatcatagtgcctggcagagttaagtgcttgatatagactgctgagtcaatgaatgaatgtaggtcctacgtatttttaaagtttactcctaggctctttttaataatttttgttcctatcaatctcttttcatcaccattacattttctacctggctactattggcacatagataagaaaatagtttctattcattcattcaatcacttattctttcaacaaacatttgcaaatcaacttctatgtgtcaggcattcttctgagtgctagggatagtgtgtcaatagagtccatgtccttgtggggtgcaaggttagaagaacatacataaaataaataagaacagataaagattattagattataaggatataaggaatgctgcaaaagacactaaaaggaaaaagagaaggaaggacagcccctcctctagatatgaaggtcaggggaaaggctcttgaaagatgagcaagaactggcaagtgaagagctggggaatgtgttcaggaagatggagaggtacatgcaaagaccccaaagcagaaaagagcttggcatagtccagggactgatggccaggtgccaggatttgatataaataacaatcaggggagggagtggcgagagaggcagatggagcaggaaggggaggggtgccatggaccctggaggtcatggtaaagaatctgggttttattcaagtgtaatttcttaatagctatgacagtggtctctctgttctgttcttaacagtattagaaatactgagtgtttccatattaatcgtgatgttggttgttggtttcaaaaagataatttcttattacaccaagaaatgggcctcttttttagactgatgatgacttgtctcaaatatagttatgattgttactttccagcctggtttgtctctgtggtttcccagctaaccgcctcaatggacatgcttcaacgtgtccttaaagcattttttcctgcctgtcacacttaggcagccatacttcaacaattgcttatgagctgtgctacattttacatatttcgggtctaaggtaactctgctatagaaaatatggcttcaaagatagatacattcaaaaccttactgttgagctcccaagaggatagattatgggtcttatattgcccactataaaatggggataatagctcctaatacatagggttgttgaagaaaaaatacagctcaactaaagcatatagatgacattcaataaacattatccattattgtccactcatatattcatccactatacatgaggtgatttgaattactaaactttatgaatcaatagttaggacagtggttaagaacctgagctacagaatcaaaatgacctacctagattcaaatccttctgccactccctagctatggagctttaggcaagttactcagttctctgaggctcagtttatatgcctttaaaatgagacttcacaggactgagataatgcgggaaagggcctagcactgtcctcgccaaaaggctctcaataaatggtagtggtgataccaatagttatgataatgatcaatgatgatgatgatgaagatggtaatggaaatttttaaaatctgattttaatgaaggaggtggcaggatcaaaggagtataaatcttggaaaaatagaaaaaacaatgagaaatggcacatctgtcccagatggaaacagaggaggtaactaaaagcagcttgaacaaaagcagagggaagagagccaaaaagaaagctcagcagacttctctctaagaaaattaggagactcctcagaaaagtgaacaacaggccaagacctcaaagagtgagggcaaagggaatctgacctcatttccatcaacaaaatgagatgttaacggtgaagcagtcttacactttaagtggctggttatttcactgctggtctaagacaggactatggttaaggggaaaggctgcagtcccagcatcgtgctcttttggagaagaaatccttcaaagagagtggtagaagtacaaagctaacaagaacaaagcaaggaggcttctagctggaggtgtcctgcatctgttgaagcacattcggacacaaaagatcaggagtttctaaacgtgaacatgtttgcgtttcctcaataggtctacagctttggcttctcaaagggatgtgcaatccaaaacaaaaacataaaaaacaacagcctaaagaagcagtgatgcagatcattaatacgtgaccaattctgagacctttgaattccttctggaccatggggatttccccaatgagaaacccctttttcagatctttattggtaaaaatattggtattttattttgtctggatatttgtaacactgaattcagcctagcttcaaaaatcaccctctgcttgaagttcttgttttagataacctcgatttgaaaaacaccagatacatattaccccctatattatctatacctatgcaaacatataacattagtagatgacttcctacagtttccaaactctctttagagagcagcttactgggaagagcagagattttgtgatcaacataggcttggactcaagtctcccctatcgcactggcactacctcatcaggtcttggataatgtgacagtaaatggacataacagaggtattgcaaagattaacggagagaacacttccaaagacatgttcactttccttgcatatttgcctagaacattttacatttctatttacaagttgatttgatacttctttttcttccataacatagatgtcatcgaaagtgagacacacatctaataattcccaaagttttaggacttgaggacatataaaatagagtcattagaaaagcaaattgactaaatagttaactaaataatacctttttttttttaacaagaggaaaggcatacaaattcatttaacatgagcgtggggagaatcacagtctgatagcccccctaaatagttattctcatatggcaatagggttcagagaggctgacaatctgatccagaatcacatagttcatggcagagctgggagaagaaagaacaccagagttctatctgaccacacaatgttttttcaactacattacactgttgccttcgctgtttaatcaattctatcaatttagctgccttaaaacttttaacgcatgttattcctagcaggaatcaactgttctcaatcctggctggctggctatcattacttaatgtaatatttgtatataatagataagattcctttacaaaaacatcgactgtcacatcttaataggccattgtgaggcaaccattattttataatttttacattatactcaaatatactcaaaaggagaaaaccaacttgcctaaagcagttagagtcataaaacataaacagagtattctttaaaaggggggtttaagagaacagagtaatttcctcatcaagggtgactgctttgtgaattttaattctgatgagaaggaaaatcaacatgaggattacactgtagcaggatttcacctccagttctatgggggtgcaagtgtgaaagaccactctctcctgagagaggatgcatgcagcctgagtgtcttcaccacacacgagaatactaggatactcagataaacaagcattaaacaggcggcttgcaagtgggagctcacaaggcctggcctgagtttgcagaaacaaaaggttacctggggaactatgggcagataaggccagagtgtaaattaagaagtatatccttttgggggaaaagcaaattacagaataaatgactgaaaaagtgaaatgctgacctaaaggaagatgctgaggcaaaattaatatagaaagtgtatttgggccaaggttgaagccagctgcccaggacacacttcaacttgccttgggccttttttacaagcagtttttaaaggaaagagggtacaaagagtgggctgatacaaagctgtgtgacaggaattctcactggtttacagagataacattgattagtgattggatacacactgttgaaccacaggggtgagttatagtgtctagtgtatggcattttttggctacttggcatcagtctagagcacacttaacaggtggctttaagaggtaattatctagttcaaggagggagtgaaactgttgtttccgtccaatgcctctctgggcctgataatttaaaggggcttgcattcctcacataaaaaggctttctttctcaaaagcttaaggagatgctatcaaactacttaatactgattaagaaataataataaaaccatgttgcatctagttgtatttattttttatttatttacttattttgagacggagtttcgctcttattgcccaggctggagtgcaatggcgcaatctcagctcaccacaacctccgcctcccgggttcaagcaattcttctgcttcagcctctcaagtagctgagattataggcatgcaccaccatgcccggccaattttgtatttttagtagagacggggtttctctat[136 bp omitted]gtgtgtgtgtatattatatatatatatgtgtgtgtgtgtacatatatgtgtgtgtatatatgtgtatatatctatatatgtgtatatatatgtgcatgtgtgtgtgtgtatatatatatatatatagctacatatggaaagtttgtgaagttgactaaacagttttttaataagagaaaaggcatacaaatttatttaacatgagcatggggagaatcacagagtgactgcccctaaatagttatcttatgcagaaaacttaattagcttggcggtggactaagtttatgaagaccccagtcacacacacttggagtactgtatttggtggatcctcaaaggcaccatggaacatatcatattttcctaaatctaagatacattgtttaactttttcatatttttcagggcacaatgtaactttataatagacatgaacatgaaaagctgttactaaatatcagtggtatctaaaaaattttaaactataatgaggctgagagaggtggaggtaggtaagtacggggggacaggagaaggaactttctggggtgatggtattattgtctacatctggataacggtttgggttatacaaggacttaggaaatgaataattaaggtttgtgcatttaattctaagtaaattttgtttcaaaagaaaaagatgaaaatactgggcttcagttaacactatatgcttaagtacttaggggacagtgtactgatgtctatctacaattgaacttgaaatgcatcaaatgaagggattaatagcccactaaagtggtatgaaaatcactttaaactgaaaacatctcagcagccacataaggaaacatcatctaaactttagcaggaccccccagtatatgcagctgccactgacccctcccagggaggttcccagattgagaaaagcatgccctttagcaccgaacagagtgaacccagctgttcatcagcatcaaatagaccaagagaaccctccatactttcccactgaagccttaaacttcacaggacccttttgtcagggagaggatatatgccttttatttctataattccatgagacactcatcactgagtacacttgtgtaaataagtcttatcttttctctgttaatctgtctattgtcagttaacttgcaggtcccctgaacccaagttgcaagaggaaaagttttcctcccaacataaacagtataagaaggactgatggatgacagacaggataaagcaagtacagtgaaatattaacagtagaatctaggtggtagacacatggctgttcactgcaaaattctttcaactgtgctttatgtctgaaaatattcataataaaatggaaaaagcaatttaaaaaagaatggaagaaaacaaacatggtacttgatgactgcccctttgtacccaagaagagataaacccaggtgctagaagacttacctcataaatccaagtctattaattggtgacaaagtacaaactaaaatggtgtcgatcatctaatcataagtgctagcgtctgtactggccactttgggtaacaaaataagtactcacgaacttttgttctgtcaaacagcaagtcattccctccctaagtgcttcctgctttcagacgttcccaaaagtcttcatcaaaccacttcatctaagagaaggtacaagtctccacctggttttgtttgtattccaacacatccacggtggatcagctaaagtaatggctccaattgtttcatgcctcactttatgatgtttcccacctgactcatgccatgccttgccatgtcttgcttgggaatgggacagcagaatgtgacacaagcagaaacttgaacaatgcttacacactggagcttgccctcttgctgctgttgaacgctgctaccacgttaaaagccagggatagactgccagagaaagagacaccaagtggagaagaaaccaaggcacccccaccaacagtcagccagccatcccacagttgtccgtagacgcagcagtgagcctccaataagaaagctgagcctggcccagatctgcagaactgcccagctgagcccaatccaactgctgggaaacctgtagaaccgtgctgatttgagccactaagtttcagcgtgatttgctgttcaggaaaagctaatttatataactcctcaaggctaaacaatgctagcaaaaaattcatataacaaagccgactgactaactctcatctcctcaaacctcctatcctgccactcctcccctttcttattaaataccaagtcttctacttcatagaaaagagaaaccattagattagaattttctcaattcacagctccccacccctacttacccgcattggtactcatctgcctccttggcccgtcactggagaagagtcgcgccccccactaggacctcactgtgcccagacacccaacccctgtgctctgcacctcatcaccctccttgctctctcaattctccttcctgcccaaatccaagccactcccaaaatgttatcttcctctcatcagcactgaatctcacccacactaaaaacaccaaaaacaaaaatcctattgatctcttaccaccactcaactactctccaccttcccaaactacctgaaagtagcaggttcatacttgagttttctagaaattgtattttatttttgacattttcacctccccttcatgcctcaactgccacctggcttctctacctcttcgctatccccagtccactccagcaccctccactctctattgctgggtccagtgggcacgctgctgctcatctcatccactcaatctgaagtgctgacccctccctctgtcccgaaatgcctctctccccttgactgctgtgccaccacaccttcttgcctcctcatgcccctatgatgggtcattttagccttctttgtggttcttcctcctctgcctgacccttgagtgtaggctttcctcaggattccacactctgctttctctcaacacattcttctaaggtaatctcattcatcggcatggcttccatcaccttccatgccactgactcttcagatctgcatttctagcacagatctcactctcctgagctccaaacccacatatccaagagcccaatgacagctccacttacatgagccatagggacctcaaatgcaatgtgtcctaaaccaaactcattatcatccactccaaacctgttcttcctcccatgttcccatgtcaggagatttcagcaacaaaaccttctcttagctcctttttcttatgcatgtaaatcaccaagtcttggtaaatctgcctcctaaactgaacaccgcttaaacgcaaccactgctctctaggttcataactacttctatacctgaagtcctcaccatctcttgcctagataactgaatagcctcctaactggtcctcttgtttcaactcttcctccactccattttccacactgctgccaaagtaatctttctaatgtgcaaatctaattgtgtcctgttgtggatattgttttattctgctgtgaatgtttaacactgagcacacagtacagtaggcacttgataatcagtaaatgcttattgagtaaaaagaataaattactgaaacgtccagtaggcctacactttgacctatgaactaaagatgtaagtttcacagattaacattataaaatgtgtgaaaagcccagactgacaaccaaccattaacaccaaatttaagcaacttacataatcttagtcttaaaataactgcgaggtttacatcaaactcttaaaaattactgctctacttctcccctccccccagacaaaaatagttgctccactttccaagaaaatcaaaaacaaatctgaacattcaacatttacttacgtgcaaagaattgactggtcctcacgatctataaaacagaacaaaacaaacaaaaaaaagaaagtgaccatttgcctggttttaaaatatttgatataataaagttgcagtaatagcctataaaatattagtaactactcctctcgagccaagttaatgcctccaaccccattatacagtcctaaatctaatcaaaccccctcatatctcctattattatgccagagtctctgggggtaaataacagtaactcaggcttattccacacatcgtttgcctggatgactttatatgcctaattaaccttgattctcaaaccctgccgcatacaaattcaaccgggaagttttataaaaatgtatttcctggcactccacctcactaaatcattcaactctgggagatggggattaaaaacccttctttaaataagcgccccaggtgattatgacacctggccagatttggaaaccacggcctttcagaatggcttcaagaatacccacaaccagagaggaatcattgctaatgtcatcttaaaggaggaaaaaaagtattaaacactgagtggaaagaaagttgaaggaggataaacatctataaatatagtctcaagtcaacatgttttatacaccaaatacaacaaaagaatctaacatgattttaaagtgattaataatttaaggatccaactaaaattttcaaataaaaaggtgaaaatcaaaccactatctagcccatggacaaaattaccagtagaggatgcagaatttctaatcacttatgagtattactatccctatttcacagatgagaaaatgttcctcagggaggctaggtaatcctcccaagtgacacggctacgaaggggcaaggttgccaggatgaggacccaggcctgtctgcctctagcacctgtgtgtgttctcaacaatacgaaacaagtttgtcattgcctagaaaggaactgagctcacaagtcctggcccaagtagcttttttgctgcttgctatgctgtgctttcttttcctctggtggatgcctccggtgcctaaggaggatttcacagcagttaggcataaataacttccatgaaagagaaataagtgctccgttcactatgtcgtattcttttttacataatattattaaacaaatccattcatatactctatgtataaactgagatttacaaagaacacagtactgtcctgctcaagtctaatttcttttttctttttctttttttcagacagagtctcgctctgttgcccaggctggagtgcagtggtgtgatctcagctcactgcaacctccgtctcctcggctcaagtaatcctcccacctcagcctactgagtagctgggaccacaggcaggtgccaccatgcccggctaatttttgtatctttgtagagacagggttttgccatgttgcccaggctggtcttgaactcctaggcttaagggatccacctgcctcggcctcccacagtgttgggattacaggtgtgagccatggcacccggccctaatttcattctaatagctcataacctggtgttattcttccttctggctgccacagccaacatttatagtacatagtcaatgtctgcctcctttattcatttacttacacagagatcacactatatcctttcttccaacatactcttcctagacacagaaccactgggatatctcctgcatgtccctttggcctcgatccagcttcacctcctctaggaataccttcccaaacactctccctcaggtttctcaatgtcgcctttttttttttttttttgagatggagtcttgctctattgcccaggctggagtgcagtggcgcaatctcggctcactgcaagctccacctcccgggttcacgccattctcctgcctcagtctcctgagtagctgggactacaggcgcccgccaccacgcccggctaattttttgtgtttttagtagagacggggtttcaccgtgttagccaggatggtctcgatctcccgaccttgtgattcacccacctcggcctcccaaagtgctgggatcacaggcatgagccaccgtacctggccaatgttgccttcttttaagtgtattttagaatcagacaaacaatactgcggttgactgcccactagaatgcattgcttgagatccgagactgtcttacttctttattctcaggattaacagccttggtgagccacagctagctttaatagaggtctgctgagagaaacccagtgctaggtgccatgtgggcactggcaagataatggggcctggaatcttttctagttctagctctgccacaaactgtgtatctataaatgaggcatttattccttgctggctggttcttcacctataaaccatgattttaccacgtctttgcttattcactctcaatatgaatcttcagacccccgaattttcctggtcttagcaatttctatagaactccactataccaagttgtttatggtttttcgaaagtagtttacacattaaagaaatcaaagcacacaaaaattaacccaaatcgaattgcctcctaattcattcaaaatggcgttcttcctgcgtctgtacatgctattatcaatgtctaaaatttgagacctacactacagcctgctgcatacttcattcccccacgcttcttgctatcccaccccctgtcaaacaacaacaaaaaaccaactctcttctagccagactcatctatttttgttatttgtctgtctgatcttgtattaactttgggcctcagtacacaggggataggcttgccaacctcccagattctctccaactctgtgatcaactccccacctctgcttcactgaatcctctgtacccttcaaggatcaactgcaggactacgacagtttccaatgatctttatactctaaaaccctatacatgtaaccaaacagagccttacggtgatattaaagggggaaaaactcactttcaaaaatgcaactagccttctaaacagtagggactcatttgatagctcagtattttccaaagcaccttctaaaaatcacataaggaggtatgcaataaatccatgttgaatcaaatcattttctaaacatgagaaagtttttaaatcaatgatctgggctcttacctaaataaaaactagaaaagagcaaattaaatcaaaagtaaggagaagaaaggaaatgataaagaaatcaatgaaatggaaaacagaaaaaagaaaaaaaaatcaatgaaaccaaatgttccttctttgagaagatcaatggtattgacaaacctctagctgaagtaatcaggaaaaaggagaaaaggacacaaactgccaatatctgtaatttttaaaaagtagtatgattaagaacccatggatattgaaaagataataagaaaatattaagaatgactttatgacaaaatattcaacaactaagatgaaagggataaattatttaaaagacacaaccactaaaactcactcaagaagaaatggtaacctgcatagccttctatctattaaagaaaatgaaattgtaattaaaaatcttctcacaaagaaatcatagctctattagaaaattctccaaaacaggtagggaataaataacaccaattctatataaactctttagaaaactgaagaggaagaagcatttctcaatccattctaagagacaaaccttaccctgataatgaaatcagaaaaaaaaaaaaaaaaaaaaaaaaaagacattgcaataaaagaaaaccacatataaatatcactcataaacaaatgctcaaaaatccttaacaaaatgttggtaaatcaaatccagctatatatatatatatatatatatatatatatatatataaaagatgatgcacagaaagaacaaatggtgtctgtcctgggagtgcaaggctagttcaacatcccaaaggtgaataatctaattcatcacatcaacagacttaaagaagaaacaccctctgaccatctgaatagatgtaaaaaagcgtttgacaaaacttaatatccactgatgatttttaaaaactcagcaaactagaaatacaagggaacttcaacctgataaaggtcagtcacaaacaaccctacagttaatatcctctttaatagtgaaaaactgaatgctatccctctaaggtcagggacaagggaaggatatttgttctcaccactcctattcaacgctacaaagtaagaaaacaaaatccaaagcatagattgaaaaggaggaaatagcaatgtctctgtttgcagaggacatagacagaaaatcccaaacaatctacaatacacaaaaacaaacaaacaaacaaacaaaaaaaccctttcagactaagtttagcaaggttgcaaaaaaagtcaatgtatattttaaatatcctatttctatatattaataatgaacaatttgaaattgaaattttgaaagttccattaaaactaaaaaaattaaatgtttagttataccaaggtatatgatatacttggttataaatctgatgaagtatacgcaacatctctgtatgctgaaaactacaaaacactaatgaaagaagtcaaagaagacctatagagagacaaactgttgatggattggaagactcaatattgttgttaattcggcctcaactgatctatagattcagtgcaatccaatcaaaatgttagcaggatattttgggcaaaaagcgacaaactgatttctaaaatttatacctatggaaagacaaaggaactaaaataaagaattttttaaaagaacagtggtagaagactcacactacctgatttcaaggtttactgtaaagctactgtaactaagccagtgtgatactggcaaaaggaaagacatatagatcaaaggaacagagagtcctggaatagacctttgttgattttccacaaaggtacaaaggcaattcaatggagaaatagttgtttcaacaaatagtgctagaacaattgaatatccataagcaaaaagatgactcgcaacccatactttgcaccatatacaaaaattaaaccaaaataggtcacagactgggaggaaaaaaattgcaaatcacttatccaataaaagacttatatctagaaaggacaaagaactctcaaaattgaaaaatcagaaaactatcaaatttttaaaaatgatagtaagatttggacatttcaccaaagatatacagatgcaaaataagcacatcaaaagatgcattaggaaaatgcaacttaaaactacagtgagatactactactcatctattagaaagaatacaatttaataaagatggacaataccaagggctaacaaggatggcgaacacctggaattcatctattgctggtagaaatgcaaaatggcacagccactttagaaaatagtttggtaatttcttataaagttaaacacacatctaccatatgacccagcgatcttactcctaggtattgactcaaatgaaatgaaaacttatgctcacacaaaagcctgtatacaaatgttgacccccgttatctgtgggggattggttccacgacaaccccaacccacagcagataaaaaaatccatggatactcaagtcccttatataaaatggcagagtatctgcaaataccctacacacatcctcccctatattgaaactttaagtcctgtctagattacttataatagtataatgaaaatgctatgtaaatagttgctatagtgtattgtttagggaataatgaaaagaacaaaagtctgtctgtacatcttcagtacaggcgcaaccatccattattttccccaatccacagttggttgaatctgcaaatgtgggacccacgaatacagagggccaactgtacagtgtcttaattgccaaaaactgaaaacaatctaaatgttctttacatggtgagtgaataaaccatggaatatgcatataatggactattactcagcactaaaaaagaatgaactactggtgaatgaatctcaaatgcattatgctaaaaaaagaagccacactcaaaaggttaaagtgtggatgactataggacattctcgaaacggcagcactagtgtttattcctagcgtttatttatttttggctacagtaaaggataatgggtgattcataagaaacctaatgatttttggacattttaaaactaatcgccttatgaaatcgccatttcactctccttaatcccttcaatctgtgtgccctcaccctcttttcgttttcctcatac[134 bp omitted]gcaacctccgcctcccgggttcaagcgattctcctgcctcagcctcccaagtagctgggattacaggaattcgccaccacacccggctaattttgtatttttagtagagacagttttctccatattggtcaggctggtcttgaactcccaacctcaggtgatccgcctgccttggcctcccaaagtgctgggattacaggcatgagtcaccaagcccggcccaagaacagttgtttaacggtgtcagtgcaagggttttaccatatcttacagcttcacagggtggtgaggagggatagttcctactgtctatatctctacatcagaagattcaatacaaagatccaagacaactataaatcactattaaatgttccttttcctgacataaaataatgctctttgtccttgttttggctttgaggtctactttaggctgaagtgactttagactatgctttctttttgtatgtatttggctgaggtatctgcccagtcttgtacttttattattttgctactttgagatgtctttcttgtaaatggcatatgagtgtattaggctctcttttatttacaggggtgttaaaagtacttatgtttattgttataagtgctatatttggtgttacatattttctgactttttttttttttttttgagacagagtctcactctgttacccaagctggagtgcagtggcgcgatcttggctcactgaaatctccgcctcccaggttcaagtgattctcgtgcctcagcctcctgagcagctgggattacaggcatgagttaccacgcccagctaattcttttctattttgagtagagatggggttttcaccatgttggccaggctggtctcgactcctgacctcaggtgatccacctgcctcagcctcccaagctgggattatgggcgtaagccactgtgcctggcccattttctgactttttaaagccttccttgatgtttcttttatagaatggcttgttttccttgcttttatttctcctaatgtaggaaacttgtatccagtttcgaagtccttcaacttgctttctcaaggttcacattttgatgtgtagcaaccttattcttaaaatgcttattcttaaaagggagggggagtaggagggagggggagtaggagggagggggagtaggagggagggggagtaggtctacctgttaccctcacaagatcactcagtagtcctaacatcttttcaaggtggctgcttgccatttcactgtatggatgagccatcctctaattaattacttattgatataataattggttgtttccagtgtttctcaggaagctaccagaggttatcctctatccaaaaattttaacagcatatgagatccataaattaatacaaccaaggaaagaagcaaaaggaatttctagattacgtaagggcaaaggcaagtctaaagaaacaagcacgaactggaggaggataacaggctttgggaggtgcgtcgtcaagggggaaagaccctgagaaattacttgatgcacttgtgtctactgaaagaggatgtgtagttcaaattgatgtaggtgattgcaaaactaccctagtccccaaaatgggaaaaatactaaccacaaagaaaacaaattatataagaaaggaaatgtaatcataggataataattaaaatgttgaatgttaaaatgtaaaatgttgattgaacttctatcaggaagatatggggagggtttagatgagtataaaaactcttcttccataataggcagtctaaagatagaaagacaagaaagaaagaaaagaaaggagaagaaaagaaagaaagagaagaaagaaagaaaaagaatatcataggcttcttacttattaataattatttatatacttatatacttatttatatatgtacatatgtaagaagaaattcctaaagagggaatccagaatagttagggtatctccagttttatgtcttattctactgtgtatttctgttttttaaaactatctttatatgttgccttaattaaaaagtaaaacataatttaagcattcaaatttctttgacaaattctgatcttgatgctatatagtttactcatttttttttttttgagatggagtctcactgtcgcctgtgctagaatgcaatggtgcaatctcagctcactgcaacctctgcctcccaggttcaagggattctccttgtctcag[135 bp omitted]cagcctcccaaagtgctgagattacaggcgtgacccactgtgtccggcctactctgcattgtttaatggtctaacccatttagattacataggaagtacctagtccttaagatttggtttgtttgtttttgagacggagtctccctctgtcacccaggctggagtgcagtgggcgtgatctcagctcactgcaagctctgcctcccgggttcaggccattctcctgcctcagcctccagagtagctgggactacagtcgcatgccaccctagtccttaagatttgacagacctgaccactaaaattgtttgggccttgtgtcttgaagacataaagatagatcttcaacaatctcttctacttctcccatggacaatgttctggttaagttttccaccttattttgagtcaattttgtctttgcttatggtgttctatatactctttgtcatttctggtagttctgtcttcttgatcacacttgccaaacatttgtctagtctgtcttttcgtgggaccagctcttagttgtacttaccagttctaggagaaaatgttctttgttccaatccacttatctcttcctacattttccctcttgttttggttcatttcattgtacttttaagtaccttttttattatgaaatgacacacagaaaaaaagcaatgtacagctcaataaattagcaaaaaattgtctattatctattttgctgaatacaaactttaatttgtctataaatctttctttcctaatgaaaacgtttagagccatgaactatttcttaaaagtggcttttgccataactcacaaaatttttatatgtagcattttgtaccttttttttttttttgagacggggtcttgctctgttgcccaggctggagtgcagtggcatgatctcagttcactgcaacctccacctcccaggctcaagcaatcttcccacctcagcctcctgagtagctaggactatagaagcatgccaccacatctggctaatttttttatttttcgtagagctgggggttcaccatgttgcccaggctggtcttgaactcctgagctcaagtgatctgcccaccttggcctcccaaagtcctgagattacaggcgtgagccatggtgcccagcctgttgtagtgatttctaaagaatctgtaagttttgatttcctcttttaccaaaagccacatagatgagtgattaataacaaaacattcatactcattaaacacactcccacaaacactaacccatttggaaatctttttattgctaatatcttgtcttattgcactgtggtcagagaatgtagcctgtgatttcttctttcaggaactgagatttttattggtggcctgctatatggaatagacaccacatttgtaaatgtgctttctgcttgcatacatacatttttcaatataagcttgctaagttgtattaaatcacattctttaatattctttttttccctacttaatatgtcaaattctgagagaagcatattaaaactccctctataactgtggttcacattctccttacatttccaatagcaactgttttaaatatttgatgcaatgtcagtgatgtacatgtaagtattatctgtctctcctagatgactacatcacactatttctatcttaaaccaccaatctctcctccctcctcctcactctcagctgaaaccctgcttcattttcacaagctcctgccagcaaccatatctgcctacccatctgcaacactgttttgaaaaatctggctgtaaaaggaaggtggaaggaactaactttcttatttaaagtaacgggtaaaactttagctaatagggaaaatttattgctaatgttaggagcctataaaaagagaagcagaagatacagtcacaacccagaataatcaacaccatgagattcttaagaaggttaagaggatgtgatcagcatcagaggtgaaggactaggtaagaccagcctttgacaggagtagacacaagagataatgatctgttcatctagctggggcagtttctctgcagtgcctctgtggaatgggaaacaagccatcagccagggagtagaggggcaaggagggacccagagatctggagcctgcagaggtttgaaatagtcattatggagagtgggaggaccaaggtaggattagcaagagttgagtgtagaatcagggctcacggtcaggaaattacagtggtatttatctgttccattatgtgagcataactccagaagcatcagcaacccaagtaacagcattaaaagagacaaatatcttgattcatccagcgtgagttttaccaaacaagaataaccaatgaacaacgggacaagggaggggtttaggaaatgggtagaagatggccatgaaatctaaattatacaaggcagaaagtgaagggtgttgttaacatatagggggaaagtaaaacaagtaatgggctggggatccacatgaagtcaaagaacacatttaggagattggactctcttctcctaagaagtccaatcttcttgattggactaccaatatggaaggatgctgcattagaactactgaaacattatctgaaaagtcagttaattctaaaagatggcaaagtctagagcatcaccatagatgttggtggcataagtgagagacggaggaattcatatgaaggaccttacgatcaagggacttgactgttcattaaaaactatgaagtaacacagggcaatggcaaggcttgaggcagagaggaaacaacgtgctggggcccatcatggagtgagagaggaaccaagaagaaagctgctgaaagtaatgagtggtgatggaggtgcggcttttccaaggcagtaaaggagtaatggtttagcagacacatagacacagtgttagtaaggacactaaccctatctcccagtgcataggatttgagtgatggagcactcttcactaaatggactcataccccgtatgtgggggaaagccaagtctcggttaaagcttgaaggaaaagaaaatattcactgaagatactaaacatacagaaagtttgcacatcagagagtgggagttacctaaggcaaaaatgaaaagggagtattatggaaatgaaaacatgactggaaacacagtgaatttcattccaggattccatgaagatggtggactctcatgtcttaaattttcattgtggcctaaaaaagtggcccctgcaggtattgttacagcaagcaaaactttcctttccatctacccaggtcaaccggggttggtagcagtgttggttgcctgctgctgaatggaagctacctggggtggaactgggctggtgaggcatcaggaacaaaggaagacaagccacaaggtggtgagcctcactgtgggtactcctaggtgacctcagatgattatgtgcaaggtagaggcctcggtgttcctaaattcagttcctaacacacagtgttgcaaatgagaagcccgatgctactgactccctttccatgtcatgttgccctatccaccaaggtatgcaagatgaagcgtatctcctttcactatttccacccagcacttttatctgaacacctgagtgtgtctttagttcaggtgacctttttcaaaaatatcacttttttcatggaacccaagaatctacaaatacattccatgtttcctactccttctctcataagcaccatctgattctttttggtctccattctagtcttcaaatctactgctctagtttccaattctgtctaatctaccattccatgcttttaatgaatgtatgattttttgcagtcaagtttacgtctaagaactctgctttcattcattcattcaacaaatatttattaagcaactactatgtgccaggcacacaactgcattttgatacagtatcccctaaaatccaatttaaaaaaaattaagctagcttcctgctttttcacataaaaagcaaaaacttttgaatattttttattaatacacttaaagatgtgggatgtgtgaccaaaaagtttgtgcatgatatgaaactaggaaggatgataaatacatttcatgcaagaaacagaatcttttttttttttttttgagacggagtctcgttctttcgcccaggccggaccacagtgtcacgatctcggctcactgcaaactgcgcctcccgggttcacgccattctcccgcctcagcctcccgagtagctgggactacaggcgcgtgctgccacgcccggctaattttttgtattttctttaatacagacggggtttcaccgtgttagccaggatgatctcgatctcctgacctcgtgatccgctggcctcagcctcccaaagtgctgggattataggcgtgagccaccgtgcccggccaagaaacagaatcttaaaagctcttggcagcttggatggggaattgaatctaaaatgatagatcagtggggccacgtgctctgaattctccacacggtccttggtcaggctactgatcctcttcttaggtccagtgacacttagctatccattcacatttgtaattgaagacctagattgattggcattggtagccggtgtgagctttaccagcaatgctgcatatgctaatgtctgactagccctgcagatgccccctcaattatgttgtgtagtagatcagcaggtagccccctacttacaaaatcaaatacaaagggaaattgtttagagtgggttgttttcattttctgtatcaaacttttaaatttttatgtaatcaaaactatcatcaactaattccttttaactttcacatggaggtttattattgtggataagaatgtgtcacactgcctggttttgaatcctagcttgtatttttcactatatacactttgttggtcaagttatttatttaactttcttgtgccttggtaaaatagggatagtaattctatttactttacaagcttgtcattaactaaataagacacaaagcctttacccagtgcttgacacacagtaattttcaataaatgtttattctagcactaaaaatgatattaataatatgatatgctgataagccacatctgcctcatatcttcctcattctgtttactaaagaggagttttcaccagcaaagccacagagccaacaattcttcctcatactgtatccatacagctggtctgggaacccactaatgggatataatgtttatccctgttaactattatgttagattcaactcctcattcaacctgtcaagagatttttaaatcctgtttcttttcatcaaatgtatcattatccctcccagtttcatgccattgacaaattttacaggaatgcatcccacctcttcaagtatgctgataaaaatattaaaagggggcacacaccctttggtgcacatccggatagatctggtcaacctcagtcattaatcagtcattaatcaatatactcacattgttttcagactgttctcttaacatattttaagctcaaggattggtttaaaggtttcccttttaaaaaattagaatgatacatgtgagcctgtccccatctttctggaaactccccttctatagaatacatcaaagaccagagggtcaacaatctcaattgtgagatgttatctgtttaaatgaggaacaatatgggcttaatcagagaaagagagcgctttcttctgtttcttctcccacatatggcacagtttgctcactaatacaaacactcttctgcatctaaagatcattcttcttaacagagacagaaccaaaaacaaaaagagtggatgattcttcattctccatctctaacagcaatttttcacagtcctagccatttcttagtattccctaagaatactaagaaattgtattgaactccaaaaaaagattattaaatttaatctttctttaaaagcctaagctcatttttaaattacaaaactgtccttaccaacttatgtatgacactattctagtcttgaagcacctcctgtttgccctggaagatctggtatataataagtatccaaacaaaaactagaagtaggacgtgggtattgtactttattaattccttcacactatccttcagacctgatcaccaaaaagaacttgccatgacctgcaatttgatgaaaagtgggtgcagcacagcccgttttctgaagattgtggaacgattttataagaaccttatgctttttattaaaacttatagaatttagtaacaaaaaatacattaaaaaggagagagagggagagttattacagaagattgggttttcacgtagcaccaggaactcccatgtttaaatgaagtcttgtagagcaataatattaattgcattcaaaaccactacattccggtcttttaaaaatgtccctccataaatcactgtgtctaaagccagggttcaaatgaatgactcctcaaatttatattcattctgatccaaaggaatacaatcaaaatcaaccaacttaacacatgctttttaacttttattgtcacccttttacatgcatttaaatcacaaataatactttacaatttttctttccccagtgcagcatctacctttcctattattcttcctattggttttaaaacctaatataatgagctttggttagaccgccttgtggtgggaatcaaatgtatatgaaaactagatgctttttaacatacaaatttatgaggtattgttttagagcaacaaacatacttatcatacttacagaaaatggctgtgttgtctgttttaatcttaaaaactcaatttttctacaataaacattacttttttattaattttaaaaaaataaaatttaacttttgtagaatacattgagacattaaaaaacagtaaattacatttaagaaattctgagcatttagtattcaaatatttccaattaccttgaagcatgcatctgtaagcagattcagatatagcatagatgtgtggaggcatctcatgacgcttcttccctctgtacatttcaataatattctcagagtaaattggaagattcttgtaagggtttataactacacagaagagtccagaataagtctagaataaaaataaaatagagtattaaaaaaaaaacctctgcatttatcaatcagggtccaatcaggagacagaaaccaaagagtcatttaagcaggagatctttaccttttggataattaatctatcccccaaattaaacttagcctataatgggcaatttagtactatgaaccacaagtagttctcccacagatagcttattaagtggcactctgctggactcaatttcctcatccatgaagtagaaataatgcgagcttcctgacttcacgtggctatcataaggtacaatcaatatgttatttacttttttacattcattctctcatgagtacacaagctatgaaaagctcgttaatgcagtttcagattccatattgcaattaatctttaagaaaatagcatttgtccagtttgggtacagtatcaaagaagaa[132 bp omitted]ccaagatggtgaaaccctgtctctactaaaaatacaaaaattagccgggcacagtggcaggcgcctgtaatcccagctactcaggaggctgaggtaggaaaatcgcctgaaccccagggggcagaggctgcagtaagcctagatcgcatcactgtactccagcctgggtaagaaagtgagactccatcacaaacaaacaaacaaacaaacaaacaaaagaaaaaccactcttctttttttccaactaaatatctccatggctggattttcttcatatgccttacccaaaatgacatgttataagaaaacagaatgcaaaagcagatatgagattccagctatgtttggttaatactaaagagatttgtaaaaatgtaagagttttcatctgtctaatttttttttgttttggaaaatacagggatttttttttcttaaaaatgtatttacttatgttaacttgtcatgattaactactattctttttaaatgaattaataaagatttaaaatgtattttaattactgatacagtaaatatcaataaacataagccaaataaacaaaagctctttgggatggatcttcagtaaataaaagctgctaggctagaaaatacaaacttttcctgatcaatactatcaattacacagaattgaccctatgaatgcttatgacttgcgggttttttaaatgtagacagaatgatttctgagaatattctacaaaactgattctgggcactacggaaaaacaagagcagtcagaaccgctgacagatgctctaaccctctaagggactgaaggcatctggaagggcactcagttgcattatgaaacagatcttttatttgaggtgatttgggtagaccaaaatctaaaagcaagaggacatgaaaaaaggctggagaattggtactgtatggccagcttccccagggaacactaagggggattctaactaacagccgtgttcataagagctgaaacccccagcaattgccaccagaaagctctccagagactactctgtttactaatgctaaaccaagagaatgaaagcctgccaaaaaatttcaagtgatcagaactgtctctctggctgcccgccttgtattttcctgaactcacaattgcaggctcagatgtggaacgcacttcctacttaggttagcagtttagaaggggcaaagggcccttatcctaaattcagatttgggctgtttgctgaagccttactactgagcagaccaggaggttatctgttcgttctttgcctgagactgtactaattactatagactcctcaagtcttcagactcttggccttcttgtatgcaaagtacagacctggcaaaccctggctggcccttggggttcccagaccaacaccttgcactttctcccaatcaagtctcttgtctatctagtcccgtatttctttgctgcccacaggacaaaagggcaatgaggaacaataaaaataaaggctttattaaggctgagaaaaacaaaggagaggcaacctcaatacctttttaggagtttaatttatataacgttaacaaatcgcaaccatacattgatgaatttttgtacaaccaccctcactttttcattcaaaaatgagatcacagtctataaggaagctacagattatactcttcaattttataaaaggcatgtaattagagactagaaagtaaaaaagctccaagaaaacgaaaatacacaaattcagtttagtgtcccatagcacgtatggcatggtaacagataataactgacacatttaatcagaagtaattccaacatgtgtgtctaccatgcattaggtacttacctgaggactacaataagagagaataagtctcacaaatatgagttcatcatcaaaaatataaaaggttaactaatcatcagtatcccatgcttgccaaaatggagcagtaatcaatgcttaagaaggaacattattaaagtgcttaaagagctaacttctaactacctaaaaaattagcacaagtattgagctcttgtataaactgatcactgaatagatactgcaccagttctgtcttcccccagacacatggtaggaaggcaatatgttgttaaaattattctggagaccttaaagttcaaatgaacttaactaagtatttgaatacacacagaagatactaagcttctttaagaaacatacactctgggcatgaagacaaatagacgcacactaaacaagctacaatgcaaagcaccaaaaagagaaagagaaagatgaactggtattataaataacagaaagctctggggcagaacacaacaaaccccaggcactgaaagtcatgaccaccttgtcagagactgtagaacaaggtaaaaaatgcagacccaaatggtctttgatgttctttttaaagactatggggtcaaaaggagagataaaggaattcctattaaagtagtaaaagcacaaaactcttacagtggcaggatatactcgaggcagtgcgagaagaccagcatagcaaaaatagtttgtaccatggaatgtgagcgacaagggcctaaaaaaacaaactgaacaattcggattttgtcatctatgggtgatgaggtattgaaggttcaggagagaaaagtgattggatgaaataagcatttcagacaaagtacaaatctggcagccatacggagaacacattgaaggggcaaaaggtgagaagcaggaagacacgtggagactgctcaacggtccttggcacaacagggcctagatgacagaaaaggcaacacaaaacagagaaggccgggacttcacagtgctcagaaactttcaacacagaaaagccattaaagaccgaagtcaaagaggactccaaggtctccaggccttacagaaacattattcgtggaaggaaaaacaactgatttgtgggaaaagataacaaatccctttaatgtactgacactgtggtatggtgggtgagccaagcaggatgcctcttgggcagctggaaatattggattgccagagccttgggaaaatcctgaagagctgcaaaggcctgaaaggttaagtttgcataataacactactgtatactttacctaagggagacatacaaaaatatttgcagttggaaacatttacaaattttcaagcccactatgctgctttatgcctccaggctcccacctatgctgaccactctgcctggaatgcccatcttcctctgtctatgattgggaaatttttttttttttttttttgagacggagtctcgctctgtcgccaggctggagtgcagtggcacgatctcggctcactgcaagctccgcctcccgggctgacgccattctcctgcatc[134 bp omitted]tggcctcccaaagtgctgggattacaggcatgagccaccgcgcccagccgattgggaaatttttcagcctggaagtgcccggcctctgtttaagaaagcagggctatgtatatgcattgtttcataggttcaaaggattagagaaacaggaagtgtaggctggtgcaaatgtcaacgcaatggagcagagatacaatagtctcctactacgaacagggattgaactgggaatatcatgtaaccctacatcccaactgtagctctcagaagaaatcagaccaccatcgagaaggaaagggaggaaggaaagaataattcacccataccacctgcaaacactgcacctagttaaaattcacatgcaaattttgaaaaaaaacctaaataataagatcatcattcagaggattcagaaataaattacctgtggaaattatctataaaataactaaaagaaaactttaggagacagatttatatctgtaacagaatatagtataacatagagtctacgtattaggacagaaatgcataagaaaaaaaataggtgaccagggccagaaaagactgtaaggaatcatctgaaaacgtaaaattaaaatccacagtggagaaaataaagggcagaatggatacctcaggaaatcaagtgataagagcagacatttattataggagagcatccttcttaaagaaaaatagaacaatggtaaaataataaaagaaaatgacgttacaaaggcaaaacttatcagtaataataatacatagagggcagaggaaggataactaacattagttgctattgcttctttgagagaaaatagcaaaaacactctgtaaaaaaaaaaaacttgagaaaactgtgtgtgtggaggaatacacattgaattaaaaggaattcgctaagctaacaaacgcagaaggaataatggcactggactcaccattttgcagctcccagtgccacagtggatctgcacaatgcccatcactattaaaatttttaggtgactggcagatgaggccactcctcatgcacaaaccaggctggcaaaacctaaaatgactcactactgatcaatctcaacatcataaagtgagagacaatgtagcattaagtgtctcctgaatctgaatccgtttaagcctctggatccaatttatggatttttctccttccagtttatagggagcaccataggattgcaaaaaaaaaaaaaaaaaaaaagggttgggggaagcggccgggcatggtagctcatgcttgtaaccccagcactttgggaagccacggtgggaagatcacttgagctcaggagttcaagactagcctgggcaatatagtgagacccctatctccagaagcaaaaaaaaataaaaaataaataaaaataaataaaaagaggggagagaaagagattaaaagtgatataacaattgctatgctttgactgtgtccccacaaaagcatgtgctggaaatttaatccccagtgcaacaatgttgggaggtgaggcctattgagaggtgcttagataatgagggctccaccttcatcaatggattaatgccaattataaaagggcttgtggctataaattctatctcttgctctctcttgagcatgctcttcttgcccttccgccttctcccatggaatgatgccgcaagaaggccccaccagatgcagccccttgaccttggacttcccagcctctagaaccataagccaaataaacttctcttgtttataaatcatacaatctgtgttattttgttatagcaacacaaaacagactaagcaaccaatctcaatatgtcaaccttgtttggatcctgaattgtacagaccaactatttatgagattatttatgagacaaaaggaaaataagaaaagtaactgaatatttgatgattagagaattgttatttctttcttagatagataatagttatgcatcccaaaacccgttgctgagaagatgctaagcagagctttcagcagcacaaaagtctaagagaacaaaaattaaaacattccagtctactcaggaagaggttggtgtggcggtggtaaataccccaagctttcagctgggaccctgatggctacaccctaagagttaagactatatgagaaacagaccagccctcacacagcgtgaagcccagttggaacagaagtcaactcctgcatggactacatgtcctagtttccctaagcctgcctgcccaaagcaaaactctagaataagcttaatgccagccagagtctcaaactatttccacaattccttgtacacaataactgggcatatgaggcaacaagttgtggctgaaatccaagataatatctggaacctctgtgtgtctatttttattgacttgtattattgccctgggttacaatatgttcaagtaattaaagacgtgactgagaattctgacagagaactggaaactattaaaggaaaaacccaaatgaaaattctaaaactgaaaaacaaaacaaaacaaaacaaaacaaaaaaagaaaaccagtaactacaattaagaattcatgtgttaaacagcaagctagatacagctgaagaaacaattagttacacggcattttaatcagaggcaaacagccagagtgatccatgggggaaaaacaaggataaaaatgtagaggaatgtgagacccagatgggacgaggtgaaacgatctggagcatgtgaagtatgtgagtccaagaaggagaaaaaagagaatgaggcagaagcagtatctgaagagataatggctaagaattttcccggaccaacaaaagccatcaagccacagagtcaaaaccactacaatctccaagctgaatgcagtagtgccccttatctgtggtttcactttctgcagtttgttgtccacaatcaactgtggtccaaaaatatttgttgaaaaactccagaaataaacagttcatacattttaaattgtgcactattctgagtagtgtgatgaaatctggcacaattccgctccatcgtgcacagaccgtgaattatcccttcgtccagcatcatcatgctgtacagctattaatcacttggtagccctctcagatctcagatcaactgtgttcaagtcacctttattttacttaagaatagccccaagcacaagagtagtgatgctggcaattctgatatgccaaagagaagccacaaagtgcttcctttaagtgatatggtaagttttcaacttaataacgataaaatcatatgctgaggctgctaggatctatgggaagaatcaatcttctatctgtgaatttgtgaactaggaaaaagaaattcatcaaatcatcacaagaagagtacaataagatattctgaaagagggagagaaaccacttacataacttttattaagtatattgttttaattgctctattttaatagttattgttgttaatctcccaccacgcctaaattgtaaattaaattttatcataggtatggccaggtgcggtggctcacacctgtaatcgcagcactttgggaggccaaggagggggcagatcacgaggtcaggagttcaaaaccagcctgaccaacacggtgaaaccccgtctctactaaaaataccaaaattagccaggcgtggtggcgcacgcctgtaatccccgctactcaagaggctgaggcagtggaattgcttgaactggcaggtggaggttgcagtgagccgagattgcaccgttgcactccagcctgggctacagagggagactctgttctgtctcaaaaaaaaaaaaaaattatcataggtatgtatgtataggaaaaaacatcatatatatatggttcagtaccatttgtggtttcaggcatccactggggatcttagaatgtatcccttgaagacaaggaggacccactatatacaaaataaaactttacctaagcccatcacagtaaaagtgttgaaatccaaagacagagaaaattttagagacagccagtggccggggtgggaaaaggaaaaccgatgaccttcaagggaacaacaatcaaactacaagctgaattctcaacagaaaaagacgaaaggcagaacccgatgcaatggcattttcacaatgttaaaagaaaacaaccgccggctctgaattccaaatccagcaaaaaccaaaaaaacttcaaaaataaaggacgagtagatacttcagataaaaggggccctttctaaaagaacggaagctaaaagatgtggaaaaaaaagagtaatggataaaactaaatgaatatcgacagtattaaaatgtaatatgtgtcttgtgggttttaaaatatagagagaattaaacaacaaaagcacataaattaggaaggaagaggaaataaatttgttcaggtgctctcaggccctacctatcatgatctacaaaagaataagagctccacatgtctaacaggtcaaggatccatgttggaatatgtaaccactaaaagaatagctaagcaaatagcaaaaatggacagctaacacgaggtgaaaagacagaataataaaaattataaccaacggacaaaaagattaaaaaataaacatagagcgggtaggataaaaagaaagcaatgaatcagaggacagatttaagctaaaatgtaacagtcattacatcacatgtacataaactaaatattccagctgaaaaatattgtcagatttgggacaaaaataaccaccataagcagtttatgagagacatattttaaaggcacaggcacagaaaagctgaaagtaagttaagaaagcaattaaccacacaaacactaatccaaaaaaaaaaggctaatgcaaatatcagactttgcaagaaaacaacagtcaattttgcaagaaaacaacatcactaaaaatgaccattccatgatttgccagaaagacatcaaatttctacatctgtatatacgtgataatagcttcagcatgtacacagcaaaaatggacagaactaaaaaggaagggattttcacagtaactgaaacaacagataataaagtatatgtatttttcaagtgcataataaccctttaccaaattaatcacataacgaaccataaagcaagtctaacaaatataaaagaattgaaattattcagggcatgttatttgaccaaggggggaatctattagaaataataaaataaacctgaagatcccctagatttagaaagtaagcaattcacttcttttttttttttttttttttttttttgagatggattctcgctctgttgttcaagctggagtggtgcagtggtgcaatctcggctcactgcagcctctgccttcccggttcaggctattctctgtcctcagcctcccgagtagctgggaccacaggcacacgccaccacacctggctaatttttgtatttttagtagagacagggtttcaccattttggccaggctggtcttgacactggcctcaagtgattcatccacttgggcctcccaaagtgttaggattacaggcatgagccactgtgcccagcctaagcaattcacttctaaattacccagagagtcaaagaaaacatcctcattaatttcaactgaatgctaataaaaatgcaacatattaaaacttgtagaatacagctacagcagtacttagaatgaaatttatggcttttaaagcacacatatagaggaccaacaaagtcaaaagtctattatttgcaaagaataaaaaaattgataagcctctggtgacactcattttaaaaaagggtaatacaaataagttatcagtatcaggaataaaagaaaacatgactattaatcctacagaaaataagcatattatgaacaacttataccaataaatttgaacatttagatgaaacagataaattcctagacaaacataattatcaaaattgacacaaggccaggagcagtggctcatgcctgtaatcccaacactttgggaggtcaaagtgggtgaattgcttgagttcagggttttgagacaagactggccaacatggtgaaatcccatctctattaaaaaatacagaaattagccgggtgtggtcccagctacttgggaggctaaggcaggaagatcacatgagcccaggacttcaaggctgcacgagctatgattgcaccagtgcaatccagcctgggtgacagagtgagaacctatctcaaaaaaaaaaagaaacactgatacaaataaaaatctgaaaagttctgtatctattatagaaaaactttcccacaaagaaaactctatcattactttaaaaagaaataacatcaatcctagccaaactcttccagagaacaaagatgaaacatttcccaattcatttgatataaccagcataatcttgatagcaacatatgacaaagatattataagaaaggaaaattttaagttaatctcactgatgaatgaggatgcaaaaatcctaaacaaaatactagcaaacagaatctaggaatctcactctctctttgtgtacatataaagaatatttggtccttgcaaggttaatttaacactcaaaaatatgcacaattctccacaataacaaaataagaagaaaaatcacattatcatctcattgaataatggaaaaacatttgataaattaacattcattaatttttaaaaaatcaaccattcaggataaaaaaatcacccattcaggaatacgagaaaatctcccttaatctgataaagaatcagtatttaaaaaaacaccaactacagcaaatatcattcttaatgatgaaatgttgacagtttcccctctgagatcaggactgatacaaggatgcctctgattatcacttctgttcaaaaaacattgtactgaaaattctagacagtgcaataaagcaagtaaaagaaatgtgtgtcaactggctgggcatggtggctcacgcctataatcccaacactttgggaggctgaggcaggcggattgcttttgcccagtagttcgagaccagcctgggcaacatggcgaaaccctgtctctacaaaaatacaaaaatcagccaggcatggtggtacatgcctatggtccctgctactcgggaggctgaggtgggaggatcgcctgagcccaggaggttgaggccatagtaagccatgagtatcccactccactccagcctgggtgacagagcaaaactttgtctccaaaaaaaaaaagtataagatttagtgaaaaataaaactcattatttgtggacaacatgtgtgctcatagaaaatccaacagaattttcggctaaactataataaccaataagtaaacttaggtcactgaagataaagtcaatatacaaaaattaattgtaaaaaatacagtatttctacataatgataacaattatgtacatattatctatataccatatgaataataagggaaaaatttaaacaccatttaaataatattcaaataaaataaaatacccaaaaataaataacaaaagatgtacctggcctctacaaagaaaactataaaacaatattaataaaaattaagaactaaataaatgagtttacccaggaattaaagataaaatattataaagatctaatttctctcccaaactgatctacagaatcagtaagatcccaatcaaaatttcaacaaggttgtgtgtgtaaatgaaaaactgacaagcagattctaaaattatattgaaatgctaagaacttaacagccaaaacaatcctaaagaacaaaaaatagaggatttaccacactaaataccaagacacattataaagctgtaataagtaagaaaatgtgatattagctgaaagataggcacacagacccaggaaatacaacagagtcaaaaacatacttatgaaccctgatttatgactaagatgccccttcagagcagtggagaaaggattatgttttagtaaatggcactgggttaactggctagccatatggaaaaaaaaaaaagaatcttgccccaacctcacaccatacacaatattcaattctagatggaattgaggctgaccctaagaaaaggatcatcaaattcccttcccctctggcttcaaactgagttcaaccaatgggagacatcagcaggagactaagggtgagaagagaaggtcaggatatttatgccctaggttctctccccaccatgagctgcctttcatgcctctaaggaaggcaattcctatcaggtagccctctccatataggtacctctctgagttgaggcaacagctctttcctaatgcttctttaaagagcaagatgtttcaagggctctcagtcatcactagtgctgagatactgcactagtcctcatttattttttaaaccctacccacattatttgtaaatctaccctttattaaactctcaaatacctcgtttgagagccttctgtttccttctggaactccaactaaatcagacattatctagaaaagctgaagatatgagttacagatatgcatatcctatcatccaggaattccactcctagttacacaccttacagaaaggcatgcttactgtgcaccaagtacatgtatatggctgttcattgaagcaatgatcataatattacaaacagagaaaaaaacaatgtacaaaacagtggagtaggcagataaattcattgggtcaaaaatattatgatggaatactatattccaacaaaaatgaataaactactcaaacttttaaaatttcacagcctttttgcactcttagaaattattaaggaccccaaagaccttttgtttcatataaaatataaagttttataaatatctatttattctaaaacaataaatacattacatgttaacataaataacatttcttacgaaaaataacttttcattttccaaaacaaaagtgagaagaatggcactgttttatattcttgcaaaacttttattgtctggcttaatcgaaaacaactcaattttcatgtctgtttctgtattcagtctactgtaatacgttgttttggatgaagcatatgaagaaaagcaaagcagacttacagatatttagttggaagagagaggaacggtttaacagtcttttcagataaccatggatatttatctttgatactactaaaacttaacatgataatttccttttttcttttttttttttttgagatggagtttcgctcttgttgcccaggctggagggcaatggcacgatctcagctcactgcaacctctgtctcctgggttgtcctgcctcagcctcccaagtagctggggctacaggcatgtgccaccatgcctgactaattctgtatttttagtagagacagggtttctccatgttggtcaggctggtctcgaactcctgacctctggtgatccgcctgccttggcctcccaaagtgctgggattacaggcgttagtcactgcgactggccaacaagtgataatttcttaaaaattagatgtagtgtagcatctgaaaccctatcagtgaacttctcatattccactgcatcaaaatctacggtttaccttgcgtattgaacaagtctttttacccatgcatgatttcataacaccatacacacatcatctggagaatactggctcactaaatatgcaagtctttcaaatgatgacattttactgtatgacatcaaaaaaacccactttcattattatcaccatctatcatatcagaaaggtttttaagtattgacatgctgtcaagttcatggtgctagatacaagtttcctaaaattctaattttcacataaaaactcaaattttaccattggcaacaaatacagtcggttgttttctttgaagtgacaggctcgttttgttcattttcaagaaaatgtctgccaaatacctctgtgtgagtaaccatagtttatcagccactctatcaaatgaaaatagcattctacttaaaaagtagcaagtttagcttgcaactcaaataactacccacatgctcgtcctcaaggcaaccatcatacattgatatgcatcaaaagtcctttaggcatacttaccattttgtcacactgaatattaaaaagatgtgttctcaaaggttgagatttaataaaatcaattatttttcctgctttaccaaggacattcttgagtgaaactgcattttttttaaactgccaataagtggcagtgaagaataaaatggtgctagtacagtttggtactagtacactgcctttattcatgataaggcgtcaggagttttattcatcattgcttttgaaccgtcactacaaatatcaacagtaaaaagggccgatgacatattcgtattgttataaaaatagttttgaccttgtgtgctcccctgagagggtctcagggaaatcctagggggtccagaccacactttgggaactactgagttacatcaacgtaaaacagtaagaataaatcttaaaaatgtaatcctaagccaacaacaacaaaagacacaaaaggctacacactatgagattcatttatataaaaattcaaaaacaggcaaaactaggcagggcacggtggctcatgcctgtaatcacagcactctgggaggccaaggcgggtggatcacttgaggtcaggagttcaagaccagcctggccaacatggtgaaaccccatctctactaaaaatacaaaaaaattatctgggtgtggtggctcgagcctgtaatcctagctgatagggaggctgaggcaggagaatcacttgaaccgggaggcggaggttgcgatgagccgagatcgcaccactacactccagcctgggcgacagagcaagactctgtcccaaaaaaaacaaaatcaaaaacaggcaaaactaaattgtcatttagggatgcatacttcattgataaaccacaatgggagatttttcacacatttttctcagtaactgacaaatcaagcagacaaaaagtagcaaggctatggaagatataaacaatacagttaaaaagcttaatctaacagccatatattgaaccctatatccaacagtaacagaatacacattctttgcaaacacagaccactcataaaagctgacaatatactacacaaaaaagtctcctatatgaacaatattctgtgattgagatgtaattattttaaaaatgaataataaaaagataacttaaaaatcaacattttgaaattttacaaatacacttttaaatggttcactaaaggaatcatcatagaaattagaaaatatttagaactgaagactaaatactacatatagaaacttgtgatgtgagctaaaacagtattagagaagacatttacagtttttaaactgttttattaggaaagaagatgaaaattaatgacctgagaaattgggggtcagagagaataaatccaaagaaaaggtaagaaaataaaataactaaacctgttagcaagctaatttgtttaaataaatttatgttatatcttatctatagaaatatgtccaaaaaaggttctacccaaattattctagtatctatattattgaacctcaactgatcatcccaactggctggttaattccaaagcccaatacatatttatcacaatgctagcatggctctccccatccccatcctcttaacgacacagacttctttggagtcaagttctccaactagaaccttaggtaagaaccctttctccacccaactaattgaagatatgatcctcccaaaccccgacctctgtgtgaccttgagactttgagaaaaactcagattctcctgtagaaggaggctgtgctttgaaaagaaactcagaagttcactcaggttgtccatgagttaagttggaaaaaaatccaacaaactcagtaagagataactgtaaaatctctgaattatgtggaatggctgcaaaacaaaaacaaaaacaacaaaaaaacacctgtcctttctttcattccttttctacttagcaccctttgcagctacctccagctgccagtgtgggaaattaaggtgaaggctggcagaaaagcagcctggctcctcttcacactgcacagtttttgatggtgacatcacatttccatacctgcacaatttattgcaatgggcttcatctgaaactgatcaacctctcaaatcttacatgtcgacattacaatctgaccataacctcttaattttgcagttttctcactccttcaccccatgatccctgttcctcaacattctgaaaacttccaggccttgatccatcagcccctcccacccagactcccattcctaccgaacgaggactccaaagacggccactgaatccccctctcactgtggaagccatgcagatccaaagccccccacactcacagacctgagacaatcccatggtctggcaaaatcacatagccaggcaaaattgcggtcaccctacacgtggttattcaatctcagctggactctcaacgccactctccagtcgctttcttatccctggcttagtctgaaattggaaaagggttgttcctaagcctttccattctcctcaagccaccgttccaaccctgtggcctcttactctcctacctcatagagaagaaaataagggagatctatcaggcttggttgaaactactctggcaaaggtcatgaatgaatcattcttttctcagcttttctcgtggctagctgcctcccaccagtcagactccagctcaaatgctaccttcacaaacagcccttaactgacccgctggagaaagccattctcctacttactctctccatagccttgtttcatttcctcattggacatttcagaaaggcagagagacctggcctgtcttcttcactgtactatccccagcacctagagcacagggggtgcttaataaatattccttaaactaattctgtaggaaaactagctctgatttactgaagttttgaattattcatgaccttcagtagcacactccttgtgtaaaattcaacaccccttttccgatttcaaaccacgaccatcaacttttcttcctacttcccttcatcgtcagtttaagtcccacacgtgccaccttcttcaaatcattgccacctctgtctaccattccctcaaacctattttgtcattttagatttttcttttagtatctggcttacatttttcctctctacattatccctctctacattatcccttatgattttcaataacttcttctacatggtcagtgacaaagtcggtgactccaacattcatgtcagctgctaaccacaggacgaccccagccagcctcaatcttaccctaattgtttcctcttaaaaacctcagcattcatctttcctacttccctactacatccagtgaagctgttcatgctgtccacagaaatttctcagcttacagcccctccactttactcttgggtatgcacttgatttttgaccgttttgctgtctgcgtccaattaatgcaactctctttaccttattaaaccttctggtcttcctgttacatgctctctcccaccttattatgctccagaagaccactacaaaagtcttcaaatgccattttattatatgtaattgcagcctgtattatttaaacttaatgtgttaagattcaaagaaaagcaagacatgggtaagcaagcaacaaatctttctatcttaaagagaaatagaaatgttaaacagagagtttgggtattccacattctcatttgattatgacaagatgtataatttacattaattcctagctaccacttcacatgattatttggaagaaatacttacatagattagtcctgaatagtagcgatccttcagattatgtaaaacggaagcttcattcaagcatgtcaattctgccatatcctccaccttggaaaacttaggtgggttcatcttctgaatatcatctttgttgaccattgctttctttccattctctgccaactccaccataacttcatctccccgttcttctttgatactagctgcctcaaaaccatggcgttctgatggaatccacactagctttttagctgtccaatcagcttgagtggcagggttgtagatgacagccctgtccacaaagagatacctctctggatcctcgagtccagttctctgcgccattgtaaatggaacgatccaaaagcaattgcctctaagagaagaggaggagggcaaaattagatgtttaagaaacaaaagaatgtacacgtttttcttttctaagaaacttaaaaccttagattaagcattaactctgtgttaaggagctggggtatacctcttcacagccatactaaccgagtttccaaggtaaatttcagcggtgaccacaaattatggctctggttgtctgatgggtttgccctcagttactgagggcaaaaaaaagaaaagaaaagaaaagaaaaggcaaagttacaagttgacccttttttttctttatctcctctttcaccctcaccacaaattaaacagggagttaagaagggaaaaaaaaaaagaaaacaaagatgggtaataaaaggttcatgaagtggtaccagaattaatatgaccacaaggaaacagctacaaaaacacatgattgtcagaagagtaaagaatctaaagaatctaaaacatgcctctcattctaccctcagataacagacttaaagttcttcttatgaataacccaaatcagtctccctctagcttttctatggccccatgaggtcttaatgtgatcaactgggaccacaaaagacaagcataacttggcttcacacggcagccttttgaatatgtcatggtagcagttcaggcctctattcccatcctgcagctcctccacccctcattcaccaagactccttcccctgccggatctctcgcctaaacagactccaacatgctgcttgtcttccctctaaagtgtgtggcccagaagcaaacatcatagcccagatatggtctgaccagtgcagaagaaaaaggaaccatcaactatcttagccacattgaggaaagtactggttctgtgacatttacaattaatgtatctcaagacctagttgttttatttagcacccatttaccattggctcacaaagggctagcagaggaagctccatcactttgtggctaagctatgtcccctcctctacttgtgcactggctttctggaccaaatggcaggattttacatccatcatctttctaatgtgactcatcatgattgcctgacaggatctttttgggatttgataccaacttaaacatttttgctgctactccaaattccaggttattataaatttcataggcatggcttccatcacttcattcaaaccaacagaagaagccaactgagtacctactcttgctctatcaaatccccacttctcccctctgttcactccactcccctagccaaaaatgctagaggttctttgtaggcaagaggaaatcataaagtagtctaaggttgttaagaggttcttgagtccatcagctaatctcaacttcaacaaaatccctgaaatggtataaaaatattatgcacttagcgtgtgtatatatgtgctataacgttctctagattctaaagggctctatctgtatcctaaaagattaatcactgatagtggttacacattcaaccaacttctgggcacaatggcccataactgttatctcagcaacttgaggggctaaggtgggaggagtgcttgaagccaaatatttgagaccagcctgggcaacatagcaagatcccgcctctacagaaaaatttaaaaattagccaggcgtgttggtgcatatctagccctttaactactactaataatttactagaaccagctgggtgcagtagctcatgcctataatcctagcactttgggaggccgagatgggtggatcacctgaggtcagaagttcgagaccagcctggccaacatggtgaaaccccatctccaccaaaaataacaaaaaattagccaggcgtggtggtgggtgcctgtaatcccagccactcaggaggctgaggcaggagaattgcttgaacctgagaggcggaggttgcagtgagctgagatcgtgccactgcactccaggctgggtgacagagcaagactccgtctcaaaaacaaacaaaaataaatttaaaaaaataatttactagaaccaaatagctaagattcttcagaaattacttgttgcaatgtaatgcgttacaaacactcatcttctatagtagcggctgtcaaattcaggcatgcatttgcagcacctagagggtttattaaaatacagattgctgggctctatcccagagtccctgattcagtaggtatagggtagagcctgagaactattttttttttttttgagacagagtttcaccctgttgcccaggctggagtgcagtggacgcaatctcagctcactgcaacctctgcctccagggttcaagtgattctcttgcctcagcctcccaagtagctgggattacaggcaggcctgcaccatgacccgctaatttttgtatttttaatagagatggggtttcaccatgttggtcaggctggtcttgaactcctcacctcaggtgatccacctgcctcggcctcccaaagtgctgggattacaagcgtgagccaccgcgtccagcctgagcctcagaatttgcatttctaacaagttcccagatgctgctgccactgctggtcctgggacacatttgacaaccattgctccaaagttctgtggttgccatggtgcgccactgctaccagcaggtatgttagagtagaaaaagaggttgaaaaccaaattctagactaattcataacaatttaaataacatgttgatgtcttaaaggttatagacttggataaaacaaaaaccgcaaaataagatgaaacaaaaaatcacacaacatgtgattaatgttattaaaacttctatacaaataaaattgctaacacattttatacctaaacttgcattagtcttctaagacatcctctttggagagggcaatacagaaaacattcatagatacatgtacattctgcataacagttttaaaagcctctagggactggtctaataacactattaacaagttgtctctttccaacttaaacgttgcacactggtaaaaagaaaggaggccaggtggggtggctcacgcctgtaatcccagcgctttgggagggcgaggcaggtagattgctcgagtccaggtgttcaagaccagcctgggcaacatagcgaaaccccgtctctacaaaaaatacaaaaaattagctgggcttggtgtcacaggcctgcagtcccagttcttcaggaggatgaggcaggaagatcacttgagcccaggaggcagaggttgtagtgagctgaaatcacaccactgcactccagcctcggcaacagaatgagactctgtctcaaaataataataaataataataataataataataataataataagtaaaataaaaaatttaaaaaaaaagaagaaaggaggcatggcttcaaggtgggaaacatcacaggtaaatttgagaacaaataataggatacacactccacctttcagaagggtagaatctattaaaagaaaatattcaactataacaaaatatgacaagtttctcttactattcttatcaggtgtaaactgcatatcctacagagcacttaggaaactgtcttgctgtcagtagacacgcacacacttcttaaattttacactggacatgtaattagatgcttaaatttagcaggtgactataaattagaataatttaacaaataacttctagaacaggtctagaagcagtagattatatatcttaaaattattttatcaaattgggacatcttacatattatcagtactttttctagatggggaaatgcttgtaatttagtattttaaaaaacccagtagaacacaaaagtgtaattacacagcatgttcccaattttgtggggaaaactacatacacgtgtgtattttttttttaaacggaacaaatattcattgggtctttactgggtagtaggattaccaatgactttcaccttttcagtctcttctacaactaaacactatgaggagagtcatctgttccacgctgtatcttgagcattttgtctagtccctggtatataacaggggatctgtacctattgatcaatatttacgtgaatggtcccaaccctcatagtgaaattcaacttctccacaaccaaaaagctattattccttcaactcctgacccaaatgccatcctttcagaagttcttttcaggtcaatgtggcaatttaatccttttccttctcctaacattttgtactgttctcctgactttcttcttaccctaccctgcgttgtaccagagggctttgcagctgttaagtgttcatattattgtttacctgatagagttcatgagaccattggagatattttgttcagtttaattcttcacttgtaattgtcaaatacatttatttcactccataatacattggtacccaatctggataatactggtgtttaacagtgtaccactcaccagtgatttgctttgcaggaaggacaacactatgatttttaaaacagcagataccattgtcatatatcactaattatggccaggcactattctaagcagtttacatacatcaactcttaatcctcacaacagccctatgaggtaggcactattaatatctccattttacagatgaggaatctgaggtacagagaaagccaataaccagcccaagggcacacagctaacaagtagcagagctgggattaaactcagagttcagctccagagtacacactacaatgatggaaggtgacatggaggaaattttgaagggtgtgtagtgtacaatgctatatactacctttctactaaataaaaacccaatcaattacggcttaaaaagtataggcttaaccaatgaatcatctggcaaaggttttatatattttatagaaaaagatacccataacttaggggaaataaagacaaacaggaatctttttgttagcgaacataaagatggtctgagggttattagtgtcattttaaattgctgcctaattacaattaaatcatttatctgtgtatgaattagccccctacagagccaaagttgccatccctttcagtggtttgacacacacacccctggggctccacccccaggtcatttttcacttccaatgaaatgtcacccagcaaacttttcaaatccctcccagcacctactatgagtgtggacagaggcaaacaattcaattttatgaacggcctgcacatagaaaggcaaacaagaaggatggataaattatccatgacagagcatccatctataacagatgagctaaaacagaactgtcccaatttgggtactgctaccattgaggtcacttacatgacagggctggacgagtctgctaatttatcaaaatcctgctcaacccaatgatcacaaacacaaaccaaacacaaaaggccactattgctacttatggcctgccccatctcccaattaatatctctatactgtgtttaatatttccaaaactaggatccaacaccaggaactttaattcctcacatgtgataaagtgcataaaccgctgaagcatatagtcttccaccctacaacgtgcccttcaagatttcctccatctcaccttccatctcagctgccttcgttataatgatttccctatggagcccaaatgaaaagccaggctcgcaggggtcacatccttctgctgccaaagctcgtgctatatcgcacaattacaccatatgctttctccagataaggacggggaagaactgaatttaagatgcagaagtaaggagatgcataaaatggccacttttccagaacccgagacaggcagggcatacttaaacatcaaaagcaagggactcaaagaataattaataaaggcagattgatgaaggagataaaacaataaatagattataaagttttccagagtgagatactatcaagaataattaaacctgactcaaagaatcctcagtttcaacgttaaaaaacaaaatctcagcaaagccaaagtattatgtttggtattacattattcagcgaaaacagcagtctttgtttcatctgcagtctgcatctaccccgcctgctttcccctaccccaccccagcccaccccacccccttccatccaccgcagtgatcttgaagggagctgcagaggccctaaagaaacagagataacggctgtaggcagaggccacgttatccaaacctcaccagcccggtctgacccgccgagtcgccaacctccttcctaaggccctagttccaaacaggcctggctgggggcctcccgcttcccagggccgcatccgcccaccacaggcccacaaagcccccacaaatgccaggactccgcggcttcaacttccctccgaaccaattccagtccgattttatgggatcagggtgtgacccccaactgcagaaggcaatgaagagactgcggcgagccattcccagctcgcttacacaataaagggatcccgaggcgagtgctgaccctccccccggccgtcctgctgcagcgcgccccgccacatttcccgcctcgccccctcaaaccgcctgggcctcgcagggcgtccacccccggcctaggcgctccacggagggcgcggcaggacgccctcctcccgcgctccttccccggcgccggcggagtccgaccctccccacgcccgcggccggctccggagcccctcacccgccgcgcgcttccccggccgcgcagagccaatgccctcctgtccctccacccacgggtcgggcgcgcgccgcccgccttccaagcccatggtgaacccctctggtgctgcgggggaccggtcgcgccaggcctaacccacccagcaacccacgcaggggcccttcctgcccagcgcccccccaccctaccgccgggactgcgctttccagccccgcttagaatcccctctcttcctgggaggcagacactggctcgcggggcacgccgagacctccgccgggacactagcccctcgacctcgcgcccccagggatcccacccaccgagaacctggtcctcacgtccccacccccagatctccatcccccagccccccaggggtcgccctcctgcacacccaggccctgacccccgcgggtttcacaaggacttcattccccgctcctccgggagtctctccatctccacccactgaggtcccagtgcccccagcccaggaccctgctcaaactaacctaaggtccccgcagcacaaaccctacagctcagaagcccctctgtcttccccagctcccgcttcggtcccccgttcctgtcctccagagccgcccgggacccctcagcccaggagccattcctccctccacaaactgtcccccagccctgggccgtgcactcggacccgggtagccgcacctctcaccttcagccgaagatggtggcgcgggcgcacgtccccagccgcgaccacagatccagcgcctcagtcccaaacccaccgctgcctccgccgggctcctttagcactgctgctcggggctgccccacccacccctaccctcattgggccagctccacgcccatcaccgccgcccccagacccactggttggtttgcgcgcccatctccaagggaagacgttagcaacccgaacgaagctaccttcccgagtccggctccctccacccacctggaatgacgctcattggctcccgctcccagcccaggccacagaggccccaatctcatgggctggctcttacgcccgtcataggctccgggaggtgcggccggggcagtggcgcgggattggctggctcgtgcgtagatggacagctgaggctggctgaacgcccggcgatcccgcgaggctgcgggtgcgggccccgcggcggccggcgcgctgcgctgacattggctgtgcgggccgcggggcaggtgggccgcggcaggaggctggcgctctgactgcagactcctcgtcctagcgtcaggcagccgccgcagccgcagcacattcgagcgcccggtcgccccctgtgcttgcggcagccggcatgtaccgcagcgggacggggttccaccgcggagtcgcgggccctcagcgttgcctgcaggggcggggcggagcgcggtccagagtcctgacgtcacccccggggctgcgcggggttggggccgcggcgctgcgactcacctgcagtgggggaaggaacgcgggggagggcgctgctccgcccatgcgcacagggtttggcccgggacccggctgcgctccacgctgcggccactgtcccgaccccggccccaggcggactctgccgggatcggccgagcgccaggcgcaggacacggtcctccaaggtcgcagttttggtgttagcggggtgagaggctctcctgcccagcctccaggcaaggctgagattccagaagaatgagaagagaaccgaccttggagagaaaacttggaagaaactttattcacctcattcattcactcgttcagtcgctccttcattcattcatcagagctccctacgtgaagggctatgagaggttcttaagaatataaggctggattcctgtagcgctgtcatatcccctagggcttatgaaaacgttggagactgaaaaacagtggccccaaaataacgaaaggaaactggaaaaatcaaagtaaataaaatttaatgaaatgtctgcagaatctaggcaactgcaacaaaactcttgcataattatatataaatataataaagtctaaatcacatgaacaaaatgaattattcatacaaaacctgaaagtcaagatcataaaaattcacagcaagatgcagttattaatcagttattaatgtaggctatgggagcattttaatacatgtgataatgatgtgtttgcctaagcctaggaaacgtctagtctggcaaaaagtgaattaagcaaaaaacaaggcaggaagtcctaaggaagggttggtggaattcagaagaggctggaaggcagctgagtgcagagtccttcctggggaagtccgaaccaggctctgttttgtcctttgtcctgctgcatctggtcccccacccccacctgcctgctggggtactaccccgtgtccaggtgtcttgtgacttggctctgtgaagaggtctgtccttctaatgcagtctgcacatggagtacaaattaactttccaaaatatatgaatgatattcctctaatgaattttaaaatgtgtttagagaagaccaaagactccctctctgaggcctgagtctccactttgtcagccaccgaagtcatttctcagtgcaatgttctatgcttagtgcatccactcgcgaataacactgtaagccacagagtcagtagtttctcataattcaaaaacttttgcatatatatgtgtatatatatgtatatatgtatatatatgtgtgtgtatatatatttttttgttttgttttgtttgtttctttgagatggagtctcgctctgttaccaggctggagtgaactggcatgttctcagctcactgcaatcttcgcctcccgggttcaagtgattctcctgcctcagcctccctagtaactgggactacaggcgcgcgccaccacggccagctaatttttgtatttttagtagagagagggtttcaccatgttggccaggatgttggcctcgatctcttgacctcgtgatccgcccgacccggcccctgaaaatgctgggattacaggcatgagccaccgtgcccggccaactttcacataattttaacacaaactcaatggaccatcagaagaggagggcaggaagttcaccagaaggaaataccataaagacattagtcttgatgagaaattaataataaagagaatatccccaaatgtatctttccccctggtggctctttggcacttgggccctacatgtccaactgcctggatgagagggggactgcaaaagcagaaggtaccaaacctattttcttctatcaccctttcccactactcaaactctctcttcccaacttctttgtgaatggaaccactcttgcaatctctttctttcctttctttttctcccaacacctagccccactatatatctatcatccatcccaggcagcctcctctgactccagttccaaccatgtagcttcatcccagaatttgctgccatcttgatgaagaaagcacaggatttagaagcagatagacctggctttgaatccaactttgcctttcacaaattacttaacctcatctctcaaaaggggatacaaatgtatacctaaaagactcgttcatgaagatggagcataatgatttcctgtaaacaaaatgtggcattataaatagattgaaaattgtccctttttctagtgtacatgtttattacagaagactgaggaatctttctcctctctctctctctagtaatttttgctgtcggtctaggctgcttttatctccaaaagaaaaagttcacagactattgttttgcagggtctaggtcagaagtccatatttgttccctcagggcagttccagcccctgaacttgttttgttccatctgtacaggatatacagcattttttaaaaaaaattgaatgaattccaacatttaaaaaccaagcactatcccata[138 bp omitted]acatggtgaaaccccatctctactgaaaatacaaaaaatagccgggtgtcgtggtgggcacctgcaagtccagctactcaggaggctgcagca[137 bp omitted]caaacaacaacaaaacaacaacaacaaaacactatgagatcccacttcacatatactggaataactataataaaaaagatggacaataataaatgttggtgaggatgtagagaaacagcaaccttaggccactgctggcaggaacggaaaatggttcagccactttgtaaaatagtttggtggtttcttaaaaagttaaatgtattctgtgtttttgaccacagtttttttaaaaagttaaacataagaccggtggcagtggattacgcctgtaatccaagcactttgggaggtcgaggcgggtagatcacctgaggtcaggagtttgagaccagcctagacaacatggtgaaaccccgtctcaaaaaaaaaaaaaaacaaaaaaacagaaaaacaaaaaaaaaaactgtagagacagaaaatagaatatttgcctgtggtgaggactggggctggggaggagagtcagcacggtgaatgtaaatgagagatctgattgagttgatgaactgatttatggtgatggttgcagaacttggtaaatttatttaaaaaattattatacactgcgaattatatgaatatgcaaaatgtaccttaataaggtaatatttgaaacataaagaaacaaagagctatca[134 bp omitted]gaggcaggagaattgcttgaacctgggaggcggaggttgcagtgggccaagcttgtgccaccgcactccagcctgggtaacagcaagattctggctcaaaaaaaaaaaaaaatttaaacataaattcaccatataatcccacatttctacccttaggtgtctaccaaaaaagaaggaagacctgtgtggacacaaagacttgcacacaaatgtttatagcagcattattcataataaccaaaagatgaaaacaaccgaatggtccattagcatggtgaatagtcaaaagtggtctatccatacaacggaatatcattcaacaataaaaaggaagaaactatgagtacatgcaacaacataggtaaaccttgaaaatatcatgcgcagtgaaggaagccagacacaagagaccacatattgtatcatccaatttatatgaaatgcccataaaaagcaaagctgtagaccaggcgtggtggctcatgcctgtaatcccaagactttgggaggc[134 bp omitted]gagacaggagaatcgcttgaacctgggaggtgaaggttgcagtgagctgagatcgtgccattgcactccagcctgggtgacagagcaaacctccgtctcaaaaaaaacgaagaagaagaagaaaaaaaaaaagctgtagagaaaatagaatatttgcctgtggtgaggactggggctggggaggagggtcagcacagtgaatgtacatgagagatctgattgagttgatgaaccgatttatggtgatggttgcagaacttggtaaatttatttaaaaaattattatacactgcaaattatatgaatatgcaaaatataccttaataaggtaatatttgaaaaataaagaagaaaagagctgtcacatgaacatcgagatttctagcttcccttgaaaaattggaaggtatggaaattcaagcaacaatttgtcgatgccttggctgctgctcatttttagacaaagtgtgtgcttcccagggtgccttggtcactgccgctccttgctgtctgtttttttgttgttgttgcttgtttgtttgtttttgagatggagtctcgctctgttgcctaggctggagtgcagtgacgctatcttggttcactgcaacctccacctcccgggttcaagcgattctcatgcctcagcctcccaagtagctgggattacaggcgtgtgccaccacacctggctaagttttatatttttagtggagacagggtttcaccatgttggccaggctggtcttgaaatgctgacctcagatgatccacctgcctcagcctcccaaagttctaggattataggcgcgagccacggtgtccagcccctgttatctcttaaagctgacccactatgctcattaacattatttgccccatctttttaggtatttatttgagttttcagtctctgccatacgtgttggggggcttcatgtgagatcatcccagagagataaaaagggtagtgtttttgagttgaagaattgttcctttgacggtggtaaggccgtgggaggtttgggatgtctagaagtgtagacaggggtaccctttgaacatgattcctggaagcagtagaacctcagggcgtggactaccgtgatggtcatctcacagcccactcagggcagtaacaccagaccagtgagaaagatcagtgctcaactgtgatatcttgagcagaaggagtgatggtaaaaacagaggcttcaatgagttgagaaaaaaaagaaacttccagaattttcttgaggcacttaagctctggagatctgaaaaaacccaggagaagaggttcctgaaaattgctaatttaacatttctcatcaaccatgtaggatttggctaagtcagatttaatttggtttagaaaaatgaaggcatgcattatgctaaatgaggtaactcaggaatggaaaaccaaatactgcatgttctcacttataagtgggagctaagctatgaggatgcatagacatatagagtgatatagtggacttccgggatggtgggagcagggtgggaggagggtgacggagaaaagactacatattgagtatagtgtacactgctcaggtgacgagtgactaaaatctcagaatttaccactaaagaactcgttatgtaaacaaaaaccacctgtacctcaaaacccactgaaaaaaaaaataagccaggcgcagtgggtcacacctgtaatcccagcactttaggaggccgaggcaggtggctcacctgaggtcaggagttctagaccagcctggccaacatggcgaaagcctatctctactaaaaatacaaaaaaattagccgagtgtggtggcgcgtgcctgtaatcccagatactcgcggggctgagac[137 bp omitted]gaaggcatgataatcctatccccctagcatcttagtcaagccatacctgtgacaaatagttattgagtatcttttgtgtctatgggctgggccagggtactgaggaaatacctgtaataacgtagacatggtccttccctcgaagagcataaagtctagcaggaaaagtaaacagataggcagatagttgcaattgagcaaaagttctaaatccagagtgcccagaaacccagagggttttcggagttctataaaacctctgaaattgtgtgcaaaatttatcatgttctcttttttctggagagaagatttagcttttagcaggttctcatagatgcctctcatccaaaaaggttgggagaatacaatatagtatcgccagtgctacattatggaaaacactgcaagatccaaggccgagttaagagggccacttaactcagaatggtgggggttccagaaattcttcttagagaaagtaatattaaaaatattatctgggctggacgcagtggctcatgcctgtaaccccggcactttgggaggctgaggtgggcagatcacgaggtcaagagatcgagaccatcctggccaacatggtgaaacccatctctactaaaaatacaaaaattagctgggagtggtggcgtgtgcctgtagtcccagctactcgggaggctgaggcaggagaatcgcttgaacctgggaggtggagtttgcagtgagccgagatcacgccactacactccagcctggcgacaaagcaagactctgtctcaaaaataaaatatatatatatatatatatatatatatatatatatatatatatatataaaatctgaagaataaaatgttaaccagacaaagagaagaggaaaattctgtcagagagaccaacacagagagaaaagaatgcagggctttccaagcccaggaagaagttgagagtagctagaacaaagagaagaagcacggaggtagagggagatatggaacagagagggtaggcgggccggctgtatatgtaaaccatgatgtggaacttagattttatccagagctcagtgggagattttatccagagctcaatgggggatctgtgggagagtttcaactgggggagtaacatgaccaggtttgtgttttagaaggctcattctggccctaaggtggatgaatggattaaagtgagtcggaggaggccagttaacaggttgcagcagcagatagcccagctcagagtggatggtgacttggactaaggaggggccaacgggtggaaagatatggtcagattgcggtgattgccactgtcaggattaagtgagatatttaaagtgccaagccaatgtgtgaagatattgaagtgcctaccatagtgcataaggatatttatagtgcctggcacaatgcttgacacatcgtaagttgattcccttcctctttcttctcatggcctcccggactaaaaacagtccctccccatatcctgtacacactttcattaaaacagctattaaaaatccttacactttttaccctctatccctgtatcctcattaaaaaccagcactgtccaatagagatagaatgtgagccaccaatcacgctacatatataatttaaaattttccagtagagacatttaaaaagtaaaaagacaccattcacattaattttaatcatatataagcaaatacatatagaatgttacatttcaacatgtaatcaatgaaaacaatgattattaggatagttcactttctttttttcatgctaagtattcaaaatctgatgtgtgttttaggtttacagcacatgtcaattcatactaaccacattgtaagtgctcaacagctacatgtggctggtggctaccatataggacaacacagtgctagactgtaaactcctggcaggaagggccagcttgtatccccaggaacaacttagtgctcgacacatagtagatgctcaataaatgtttattggataaaaagatgacaggatggatggattaatgtatggataggtggatgggagaaaggatggatggatggatggatggatggaaggaaggatggatgaatggatggatggcaggatgaatggcaggatgaatggatgaaggaaagaagaataaatggatggatggatggatggatagaaagaaggatggatggacagcaggattgatggcagtatggatggatgaaggaaagaagaatgaatggatggatggacagatggatagaaagaaggatggatggacagcacgattgatggcagtatgaatggataaaaggaaagaagaatggatggatgatggatggatggatggaaagaagaagagctggatggtaggttgacaggatgggtggatgggtggatggatggatgaggagatccctttcagctttggggaagagatagtgttgtagctgagtctgaaagatgagcaggatgacaacagttaaggatgatgggctgcaaaaggcaagcatggaaggaaccaaagcatggcaaaggcaaggaaaagtgatatcaggaaatggtgggaagtaatagagtttggttaaagtatgtaatgcctgctgcacaaaagaaagtgggaagtgatcctggagattcctaaatctgacaccaaaccctatgtacaacagggaactcccaagcttctagcattgtttgcttcagtcaatatttgagggacagatgaaaagagaaatgagaggaagaagtaacgtaaaggaggaaatactaacaaaaagaaagaaaaatgttgacaaagtggtaagaattactggttttagtgttagcaaataacaagtaataggaaagcttaccagaggacccttgccattatcctttccatcctgatggaaagaggaacaggtcacaggaggcgaatagcttgagaagcctgaagtctggtcagtagatcagtggttagaaaataatatagtgttgttggtctcagagtttctgctgttccctgatggatcagacctgtagggaatgtggtgcatttgctggtacagagggcccaagcttgacatcaagcctgattgttgtcacatgacacaacattgctgccacctcctttttaaggagccagggctggtttgcttcctttctggtcagtcctacacatcgagcattagaggaaatcaagatattgccctgggtttgttgaaaatagatattattcttcaggcaaaaaagtatgtgggcatctcattggaagttgtttgcaaaatccaaatcagttgttttcttgaaagatatttttatcaaaagctttaaaacatcctttgtgatactgggaaagttccttaacctctctgagcttccatttacttgtctgaaaaacagggataacaatacttacttcaggctgggcacggtgtctcacacctgttatcccaggactttgggaggccaaagtgggaggatcacttgagcccagaagccaaagtgggaggatcacttgagcccagcctgagcaaaatagggacaccctatctctacaaaaaatttaaaaattagccaggtttggtgttgggtgcctatagccccagctatctggggggctgaggtgggaggatcgctggagcccaggaggttgaggctgcagtgagctatgatgcagccactgtgctctaacctgggcaacaaagcaaaacactgtgtcaaaagaaagaaagaagaaagaaagtaagaaagaaagaaagaaagaaagaaagaaagaaagaaagaaagaaaagaaagagagaaagacctactttataaggttgctgtaaggttaaatacaataaactaacacttgtaaaggttttagcacagtggcatttgtaaatatcttatcacaaactagcagtcaatagtgtcactctttattattgctattatatttatcatcgttatcattaccatttggaaaggacttgtacatagcctttgcctttcaaaggaagtgtgtagtgctcttttgttattttctatagatgtatattaatgagtgttgttccttgcttggagttttaaatgatacagaaacaatacataactgcagaggaaataatctaagcctatcaaagttcttataaaaagtaaagaaagaatgtaatatagaaagactgctaattagaagttgtacacccaaatagaccataccaacagcccttacacagaaagatccactctgatagacatgcagatacctgtacacgcttagcagcatttactctgcatatctaagcaagataaattggaagggataagggataatcatgatattcatgatgtgccttgactgcaggcaggtggtaatctgctgctgcaggtaggatggatggcatgggggggtgatatgatctggctgtgtccccactaaaatctcaccctgaattgtagtaatccccatgcaaaaagggcggggccaggtggagataattgaatcatggggttggtttcccccatactgttcttgtggtagtgaataagtctcacgagatctgatggttttataaatgggagtttccctgcataacctctcttgcctgctaccatataagacgtgcctttgctcctcctttgccttctgccatgattgtgaggcctccccagccatgtggaactgagtccattaaacctctttcctttataaagtacccagtcttgggtatgtctttattagcacatgagaacagactaatacagggggtaaacatctggactcagcaatcaattaaattggctccaccacttacaactgtgtccttagacaagccacatgacatctcaagaccttagtttcctcatctgttaaatggcaatgatgatagcacagactgaatgagattgttttaaggattaaataagacaatgcatgcaaagacttggcctaccattgggctcttaggaggctattcttttcttttctttctttctttttttttttttttttaaaaacagtctcactctgtcacccaggctggagtacaatgatgcaatctcagctcactgcagcctcgatctcctgggctcaggtgatcttcccacctcagcctcttgggtagctgggactaaaggcatgcaccaccacacctggctaattttttgtatttttttttgtagaaatgaggttgtgtcatgttgcccaggctggtctcgagttcctgggctcaaaccatccactcacctcaccctcccaaagtgctgggattacagacatgagctatcacacctggccatatctagctattcttaagtgctcaaacttgaatcttattaagcgtctgaatctactaatttacagaaaatacagaggacagaagaccatgttaaaccataccagagtaatgcaatcgacgaaatccaggatgtagaaagcgtcacagaacaaacagcctggcttcttcaaccaataaattgcaagtaaaggaaacaacaaagagatgggccaatgctatagattaaaagatacttaaaagatacatcaaccaattgcaacgtgtgaagcttttttgggagcctgattcaaataaacaaacagtttatgaaacaatggaaaacaagtaatttatgaaacaatcggaaatttgaatgcagactggatattagatgatattaataaagtactgttaatttttaaatgtatggtaatgctatcgtcgttatgtaaaaataaagaatccttttcttttagagatgggcactataaaattacagatgaaataatatggtgtctgggatttgctgtgaaatagtatgggagagagtatagaaagaagtttgttcatgaattgttgaagttgactaatgagtataccgctctctctttatttttggatatattggaaattctctatgaaagaaaccttaaaaattactttggttgatatgatttttattgggagtgccaaatcctagtggggaaaaatgagatcctggagaaaataagaaattgttcagcttgaatgttacaatcctcataatctagtgtcaacccaccttctcaattcacgcctcgtccttcaacacagatgtttctcccagttatcacctccagttggtcttgtcatcttctttgcttctttctggccatcttccccgctttgtttgtactatttcctcctggaaggccctttctccgcaaattcaccaggcctggtcctccccacccatcaagactgaaccccagctgggcatggtgactcacgtctgtaatcccagcacttgagcccaggggttctggaccagcctgggcaacatggcgaaaccctgtctctacagaaaaacaaaaagcaaaaattgattgcacgtggtggcaggtgcctgcagtctcagctactcaggaggctgaggtgggaggatcatttgaacccaggaggcagaggatgcagtgagccaagatcacgctgctgcattccagcctgggtgacagggggagattcatcaccataacaacaacggcaacaacaaaactgagctcaaagttcaccttcgccctgaagcttctctgaatactttagccaaaatttttttgaattcaatagtaaatgtcggctcaattcgtgatcccgaatctgcctcaagtacatgtgcagtctcatctctcccctctcatagataatcctgaaaactggattaaacccagttccctgaacataacccacgctttctcgttacttagattttgatcacaataccttctctgccagggcctctctgatgtctccatctattgaaattctatccattcttggaggcttatctaccaaaaagtcctcctccaccaggaagtctttctctacctctactcccaacacacctgcagcccaactaaatgtgatcctgttcttttaatttctaaaatggtattaaagtgttggtggaaaacagtcactgagcccttttgttttgaattgacccataataattgtatatatttatgggatacagtgtgatgattccatgcatgtatacattgcgtaatgatcaaatcatggtatttaacatattcatcatcccaaacatgtatcatttctctgtgatgagaacattcagaatcctctctacttattttgaaatatatactatttaatatgatatcatttaccgtagtcatcctgctgtgctacagaacttattcctcctatctaactgcaattttgtacttgttgaccaatctttctccatcatcccgtctccgctaacttccctagcctctggtaaccactattccactctgtacttctataagatcagcttttttcagattccacaaataaatgagatttacagtattgtcttactgtgcttgccttatttcatttaatacccagtgaccactttgagaatctcatgggaactatggaccttcactctcctttccatttgcacatgtgtttgcatgtgcaatgttatagttgattttggggggaaggctcatgaacccaggttaaattcctgtcttgttccctttcatataacacttacaatctttctggtgttcacattatttgtaaataagatgttttcttctagatgatgatgatgatgattattattttttgagacagagtcctactctgtcgcccaggctggagtgcagtggtgcgatctcggctcactgtaacccctacctcccaggttcaagcgattctcctgcctcagcctcccgagtagctgggattacaggcatgcaccaccatgcccagctaatttttgcattttcagtagagacggggtttca[131 bp omitted]atactttcctaacgtttgcatcccccatagcacctcacataatgttgcatgcatttgaagttctcaaaaaatgtttgttgcacagtcaaattcgactcattgggtgattgattcatgttaataattgtgtaatcaaccacttgctttttaaaacctgctcctggctcatattagcttttccagtttgtttctttatatcttttcttttcttttttttttgagacggagtctcaattaataacaaaacaaaagtgctcggtgatttttttccaccaacactaaaacatactgttttctagattaaaagaacaggatcacatttggatgggcggcaggtgcgatgggagtcgaggtaaagaaagacttcctggtggaggaggactttttggtggataaacatccaagaatggacagaatttccataggtggaggcatcagagaggccctggcagagaaagtattgtgatcaaaatctaagtaatgggtaagcatggggtatgttcaaggaattgggcttgatccagttttcaggattatccatgagacggacgagataaggctgcaaatgtactagaggcagatttgggatcacaaattgagccgatatttactattgaattcaaaaagattttggctaatgtgttcggagaagcttcagggaggaggtgaactttgagctcagttttgttgttgttgttgttttggtgatgggtctctgtcacccaggctgcagtgcagtggcacgttctcagctcactgcaacctccacctcctgggttcaagcgattctcctgcctcaggctcctaggtagctgagactacaggagtgcgccatggcacctggctaattttttggtatttttagtggagatggggtttcaccatgttggccagactggtctcaaactcctgacctcaggtgacccactcgcctctgcccccgaagtgctgggattacagatgtcatccactgtgcccagccatacatcttttctactagggaacagaatcaaggggccgttttcagatttgtgcagctgctgaaaatcttagggtaattgtgaggcatcggtggcagaggctggaacgccacactggactttgcattaggctcatctaagtccttgatatcctcagcaccccaagtttcttgacccaatcgtgcagcaaacattagacctgccagggcaaatggcatcttataggcaccttgggataattgcgggctctctcgacaattttctacatgagggcagatctggtgtcttggcagagcgtgtggccgcttccatcactggtctcgggggtgttacaaggccccatcagcccagaaacccttccccatggttttactgtggcactgcccatctatctgccgcaaacctcccgtcatccaagtgactcttttggcttgaaccataacaatggagagtcaccataagatagtatctgtcacttgggagtgtgtgatggttaatactgggtgtcaacttgattggattgaaggatgcaatattgatcctgggtgtgtctgtgagggtgttgccaaaggagattaacatttgagtcagtgggttggggaaggcaaacccacccttactcgggtgggcaccatctaatcagtcaccagtaaatataaagcagggagaaaaacgtgagacagtgagacgggcctagcctcccagcctacatctttctcccgtgctggatgcttcctgccctcgaacatgggactacaagttcttcagttctgggactcgggctgactctccttgctccttagcttgcagacggcctattgtgggaacttgtgatcgtgtaagttaatgtttaataaactaacaggatgtatgttagttctgtccctctaagagagccctgttctgttctgacagttctgtccctctagaactgtgagttctgtccccctaagagaaccctgactaatacagagtgaggggatggatttgctagtcaagttagctaatttccttgttggaaggagcctggccacaggtgtttgggaagccatcctaagtggctgttgggtgcactgtgctgggaagccttccctttggttctcgcccagcctcaacttttgggtgtgagaaacaccactggggagctcaagaaaaggccctcatttccccacattttatgccctcaattttttttttttttgagacggagtctcgctctgtcacccaggctggagtgcagtggcatgatctcagctcactgcaagctccgccttccaggttcatgccattctcctgcctcagcctcccaagtagctgggactagaggcatctgccaccatgcactgctatttttttttttttttgtatttttagtggagacggggttccaccgtgttaaccaggatggtctctatctcctgacctcgtgatccacccacctcagccttccaaagtgctgggattacgtgagccaccgtgcccggctgccccaaattttatagttagttgtgcagagtttttggcacatcaggacacagtgattcctgctctcccttaaatgtgctcatgaaatgagattttccgatttccttccatttaacacattgacggttgcgagcccactaataatagcactattttccatccctggtatatgaaagttggctgcaggctggagacacagaggccctgcctaggaacccagccttctcaaaagggcagcagagctagagtgtgcccttcagatgagcctgtggaatcacagaatccagacctctacagatggaagaggccaaagatgccacctagacatcatttcacggatgaggtaccaagctggagacttgcaccagatgacacagcaagtcaaggcagagctgggactcagccctaagccgcgtgcccgctccccatccacagctttctctgtgtcctcattgccagtcgtggcaattttatggtgcacctaccatgtgggaagcactgtttcacatgctggaaaaataatacagtgcatttcagtaaagatcgctagaattcagaagatgctggtgtgtttcagtgggggcttggggagtgatgggaaagaacctgggggcatgggacttatgttcagttcagacagagtgtggagaggagaacattgagtgtcaggatgatgggggagccagacctagaaacttttgggagattaaacagaaagctgcccactcttcccccaaagtgtctatttacaaatcacagagacctactgttagcttctcttccccacaacgcctgacagcctataaaaatgacaaaaactcggctgggcatggtggctcatgcctgtaatcccagcactttgggaggctgaggcaggcagatcacctaaggtccggagttcgagaccggcctgaccaatacggagaaaccctgtctctactaaaaatacaaaattagccgggcctggtggtgtggctgtaatcccagctactcaggaggctgaggcagaaaaatcccttgaacccaggaggcggaggttatggtgagccaagattgtgccattgcactgcagcctgggcaacaagagcaaaactccgtctcaaaaaaaaaaaaaaaaagctgaaaactttttccatgtttccaaccagaaggccagaggctcttggctgatgttataaagcaaggtagtatccagatagtgtctaccgaggtggttaaacaaagatgctttggagataggcagcctgaattcacattccagctcgtgacattgagcaagccacttaaactctctgggtctctagtgtcacgatgtacgtgaaggaatctctgtacgtacagtggttaacacggtgcctggcccacaggtaatgcttacagtaagtggtagttgttaacagttttggtacttgcctcgtctgtctccctagacctggctctggggtcaacaggaagttagagacagatgagttctcccagaacatacctggatcaagacctattaaaagtttctttatctctcttcattgtcacatctttcatttcagggaaaatttggaggagctaaattgggaatggaaaagttgcatctgacaaaaggtatgtgcaaacacatgtttgcaaatgaggtcaagatttcaaaataccccgtctctgacagatgagtcaagccccacgcagtggtcttactatttcccacgtatgacggcacattctctcagcgaccgatagcatcgtctgccaggagttatactggagggagttactcattggaaaatgtggctgcattgcccagattgagatcgcaagttggacttccagggatttcacccaaaataagctgaattcctcagttataattgtccaagggatacagccaaagaatctgtatgccagaccagcactggctcctgctagggcaagtgagggtgcagacaggggatggttgtggttctcagcaggggtgtgagggacactaggtttgtctgacccgcaggctttttctaccaaggactgtcgccaactggtcaatctttcatgctttgacttagttatttgctcactccctcagcaactattttttgatcacctaataataatagcttacacttgcttagcattattatgtgccaggcaggtgctaagcaccttatatgtggtagcccatgtcatccttccaacagccctatgagacaggtgtttgtcttagtcagttagggctactacagtagaattccgaatacttatttcttacagtttgtaagtctggaagtccaggatgagggtgccagcttggtcaggttctggtgagggccctcttccaggttgcagactggcaacttctctgtggatcctcacatggcagaaagagggcaggagagctctctggggtcccttttataaagggaccaatcatttactgtcacattggaggatcagggtttcaacatgtgaacttggggtgggggaacacattctgccccttacagtcttatacggcagggtcaaaaatgttagctcaaactataactgagatgggtagaccaacgtgaatgttttactttgtctataactcatctggcttcttcctcagcccccatccccttcactcacatgt[141 bp omitted]ggccaacatggtgaaaacatgtctctaccaaaaatataaaaaagtagctgggtgtggtggcacacacctgcaatcccagctactcaggaggcagaggcaggagaatcacttgaacccagaaggcagaggttgcagtgagctgaggtcacgccattgcactccagagcctgggcaacaagagtgaaactccataaaaaacaaaacaaaacaaaaacactccatctcaaaaaaaaaaaaaaaaaaaaaaaagaatctgtctgatctgatcatttaagtagcccgtttaggtagcactcattctccttaagataaatactcaggagagtctctcagatagcccctctttttgcatccctgctgtttcctaccctcagatagtgttggggtgtgtggggaaggtgtggggctcactccacctgctggcagtgggaagctttggagtcgttggtgtaatgtcctctggcccccagggctgtgtcctgcatcccctcatttgatatcttagcacacgtcattttcctcctcctatacctacccaataagaccatactcctccacccagcttcacgactctccctgccaggggtggcatcctcactttccaaccttctcttctatgtttccaatttgttcctcaaaatccagcttagatccacttccaccttcataagatcttccgggcaccgtagcctgaacactccctttttctgaacttctggatcatagcaactaattttgttcaccaattatgtcctcatctgagatctctcctttcttattgtttcatgaagttacatgtatctcttgttgttgtgtaatatttatagtttgtttgagagcatgggtgatgccttatattttgttgaatttcctaaatctaatctggagtctagcacagagaaagaaccaggtgttcacagacaaagagttcatatccttgtttatgagaagctcctaaaaatagaggagaggaaaacaacccagtaataccccaggagaatgggctagaggtatgaaaagataattcgcagaaaaagaaatgcaaatggtcctaatcacacacacacacacacaagctcaacctcactcagaattagaataataaaacattaaaatgacacagatactatttctaacctatcagattggtgaaacctcacaagttttacaacatattcttggcaaggtgagagaacagcagacacattcgacattcctggggagctatatgttgttatgtaataatcaactgcaattgcattaggggaaaggattagataatgtggtttatttttttattttttatttttttgagacggagtctcgctctgtcgcccaggctggagtgaagtggcgcgatctcagctcatttcaacctccgcctcccaagttcaagtgattctcctgcctcagcctcccaagtagctgagactacaggtgtgcaccaccacagccagctaatttttgtgtttttagtagagacagggtttccctggggcctgaatggtgttccttatgaaagaggatgtttggggactgcatctcacttagccagcactgagtgccggtaacctagggtccaaggcacctgtgagctttctaataagagtctcgtttgtgtttgtgatatgtggggccctctaagcagggacttagggtagaagccccgtttgtcaggttccaagggaagttctgttctggagtcatctccaatgaaaagagcaagatggggaaaagtgtgtgtagaatttaagaaaggagatgtgtgtatatacagtcatgtaccgtgtaacgatgactcagtcaacaatggaacacatatacaatggtggtcccataagattgtatacagtatttttactgtagcttttctgtgtttagatacacaaatactaaccactgtgttaccgtggcctccagtattcagtactgtaacatgctgtaggggtttgtatcctaggagcagtaggctataccacctagcttaggtgtatagtaggctctaccatctaggtttgtatcagtacacttcgtggtgttcacacaatgacgaaattgcttagaacatgtcctgtgattaagtgacatatgactatatatatttatatatgtatattttacaaaagataaaccataattttaaaaaagttatctatagggaaagagagggaataggatagagagacaaggataaaagctgaacttctctcaatataccttgttttgtagataggactttagaaccatgtaaatattttatataagaaatgtaaagttttaaaagagagtaattaaaaaatctaaagcaaatgaaaaaaatgaatataactctttatctaatgtgaagcataaccatacagagaaaaatgattccaagtgacctgaaagcatagaaacttgagtgtacattcctagtgggctatatcctaaggacaaaaagaactgtccaaaaaaagaaagaaagaaaaaaatggtgacttattttcagtaatcatattgttggtggtaatgttattctgagaccattgtgtgcatacggtgagataaaagaaataagtaattctgttatattgtcaagaaccaggatttttcagtgtcagagaaagcaggcatatatgcaagatagatgaagttaagtcaaaacttgatggtactgaattgaactggaagtttcagtatgaattggtgataatattttgtcattaaaaagaaagtatttctggctggacgcggtggctcacgtctgtaatcccagcactttgggaggc[134 bp omitted]gaggcaggagaatcgcttgaacccggaa[136 bp omitted]caacctcgtggctactaattgtggtctagacgtattaattcccaccaatgaaaccaagactccttgagaaatgcctaggtccagtctgaggtgggaaatatacaaaatgagcttggaacatcttgtcataacagaaagcaaggaaataaaatatcaaaaactattatgttgtgacaaaagaactcaggcgctaacttgaagaggctcccaccggccacgaaaggtgggaggcacaatgtgagtatcaatgataataaggacaatgagctgaaacgtattaaatatgtttaaatacatgggtttttaatgacaaaaagaaacaatctaactcattggttaactttgaaaagggcaagggaacgatgttatcattttgaaaacaggtaaatagaggcaaaaaaaaatccagcatttatcttgcctttcttgtatgactgttatctcagatggccaaatagttgaggagagagaagtttctctttatataagtattgcagctgaaaaatgacaaaggaattatagaattggaacatcattgttctacaacccctgaaaatactgcattttaacaaaaattgtcaatggatgttaacatcacaagaaggaaatcaacctgacatgtgactcctggcggaaatacacaatcccacctctgagctattcttgtcaagaaacctaagtgtgattcagcctctggatctcactaccaatttaccagcaacacagaggacagagaaacaagttaaacatcaccataggacagcaatcttgaaaaattcaggctgtggaaaattttataggacaacctgatttcttcaacaataaactacaagggggctgggtgcggtggctcacgcctgtaatcccagccctttgggaggccgaggcaggcggatcatttgaggtcaggagttcaagaccagcctggtcaacacagtgaaaccctgtctctactaaaaatacaaaaaaaattagctgggcatggtggtgcatttctataatcccggctactagggaggctcaggcaggagaatcgcttgaacctgggagaaggaggttgcagtgcaccaagattgtgccactgcactccaggctgggcaacagagtgagactctgtctcaaaaaaactaaaaggaaattacaatagtaccttcttatccttagttttggtttctgaggtttcagttacccgtggtcaaccatggtcccaaaataggtatgtatagtacaataagatatttgtaaagagagagacagagagaccatattcacataactctcattacagtctattgttctaattattttattttatcatttgttattgttgttaatctcttaccgtgcctaatttataagttaaactattttagaggtatgtatgaataggaaaaaaacatggcagatataggggttaatattatctgtgttatcaggcatccaccggaggtcttgaaacttatccccagcagataagaggggggctactataaaaggaaaggagaaagagaaatggaagagagacctatagatcaagatcaagcacaagggatgaaatacttaccagcaaacataatgtatgaaccttttttggcacttgattcaaaaaaaccatacattgggaatatttgaatattggtttaatatatattgagaaattgattattgttaatttttcaggtgtgataatgatatggtggttagttatttattattattttttaagacaaggtctcactctgttacccaggctggagtgcagtggcatgaccttggctcgctgtgacctatgcctcctaggctcaagtgatcctcccacctcagcctcccaagtagtggggactacagtcccgtgcccccatgcctggccaatttttgtattttttgtagaaatggggttttgccacattgcctaggttaatcttgaactcctgggctcaagtgatccacgcctgaccttgtggttatttttttaagtccttatctagagatacttaacagaaatatttaagataatatgatgtctgggatttattcaaaattatctggaagggggaagaggtagaattattgttgaaacaagattgttcatgaattaaaaattggtgaaactgtggatttacatgattccacatgcttttccagcccaaggaaggctggaaatctatgaggtttttaaagtgtctgtctttctctttgtaatctcataggtgctgcctgtggttggaggcaaaatcctggatttcctcaatggcttggagttggagggctgttcctgtggttgtgatttcaacccaagtgctagtagaattgagcacttagtttcctggttatgttatcaaaccgaaattcggattggcctccctaggtccctatatttgacaatggccacactgtgctgccaggaacagacactggaaatatcagtgcctcctttcactctccaatccactagcatacaagctccatggggccaggggtttttatctgttttgttcactgctgtgtcttcagtgtctataacattgcctgacatcgtaaatgctcaataaatctttcatgactgaatgactccaagcagttgccgagtcctgtgacttttcccttataattcaccttctacctgtccattcccattattacctgtggtgaaagaaagatggtcacaagtttttgacaatgctcccattgaaaagtgactgtgtgtcccaacccccttgaatctgggtgggctctgtaactagttgaaccaatacctatgatacaaatgatgctgtgtcactctacaggcccaggacttaagagatctgcaatttccacttcctctctcaaaccctcactcttagagccctggacagctagaaagaccctggaactatatggagaaggagaagagatcaactgaggtcagccttccagccgtttctttcaagaagccaggcatgtgagggaagctatcttgggccttccagcctaccagctgaataccactgagtgactccagataatgctatacggaacagaagaatcacccagctgagccctacccaaattcctgatccacacagttgtgagatataataaaactgttgttggcggggcacagtggctcaagcctctaacccccagcacttaggcaggctgaggcgggatgattgcttgaggccaggagtttgagaccagcctgtacaacatagagagaccccatctctacaagaagtaaaaaattagctggctgtggtggtgcacacctgtaatctagctacttgagaggctgaggtgggagattgcttgagtccaggagttcaaggttacagtgagctatgatcatgccatgcactccagcctgcatgatagagcaagatcccgtctctaaaataaaaaaaaaaagtttccattttgagaccttaagttttgggggtgatatgttaatacagctataaataaccagaacattagcctactctggaccttataacttcttgcctggaaaactgatccctacattcagtctcctacctatccttttaactaccctctgcatggcatagattagtttctatgaaggagttactgcttaaaaaaaaaaaaaaaaagttatcatcaacagaatacagcccaatctctttagcttggccttatggatctctgaacccaactctgcaagctctcctatcttcctctcacatgacttgtgcttgagccaagtccagattttggcttatccatttgaccccccatggttttatttttgttcatgctttccctcctcctggaatccacttcattcattcatgtacatccaaattctacttgctttccaaagatgtccacaaatgtcaatccccacaggtagaaataatctctttctcctgaatttccacagcattttaccaaggcctttcataaaacataccctttccttcctttttaacattataatttggaaacatgtctttatcattccgcagagaccatgaaatccttgaaggtaagattcacatcttatttacttattttaaactcattattgaaactagcagccaggcgtggtggctcacacctgtaatcccagcactttgggaggccaaggtaggtggaccgcgagttcaggagatcgagaccatcctggccaacatggtgaaactccgtctctactaaaaatacaaaaaaaaccagccaggcgtggtg[131 bp omitted]tcaaaaagaaaaaaaaaggaaagtagcaaagagtttggctcttgtagacccttaataaatattttttggatgaataggtggatagatgaacaaatggggcccagtctcattttgtggttatagctcagcagcaatcacactgtagtcatgcatcgttaaactatcagttcagtttcctcatctgtatgttggtggaaataacaataatgataatatcagtcttgcttctgttacatggttgttgtaaagatcaaatgagatgtgaaagcaagaagtgctaaatgcaaggtatccacctggaattaaataaagacaatttttagcaaaggcggccgacgtgactgcttatgactccgtattagccacagcaggccaagaaattcagagaaagcgtggtccccactggcacaacctgggggaagaccagagcaactcaaggaaccactgactcagcctctgctttctttgtaacaaaacacttgagggcaaggggagaaagtggaactccttacaaccgcctgccccaactccttggatgtgccaggcaccagggctacgtttaaccctctggggtccatcccaaccaaaggctgaggtgcctttgagaagcaggcctgtggaatgtggactcttgctgtagctaaagcagagaagggaatccagtggcccatgtgaaccctgcaaagtgcctgggaagacattgtttcaggcctggccacatgcatttgctcaaaccatgtccccgagcctcaggttctccctctgcgtttctccgctctgctcttttctgtcttgatttcctttacaggcagtctctcccatgtggtggcacagatggttctgagcagcctcacacttacatcctaccagtttaacaacctcctcgccgaaaagagcacttctcttccccagtagttccagaaaaagtctagggattaggactcgctagacagacaggagctctttccctgagccaatcactgtggtcaaggggatggagtctcctgatggcccagcctgtgctatctggagaccccaggagctggagctggaggtggaggcagtggtggtggtggggattaccctaaaggaaaaggatggtgctatcaccaaagaaatggggaatggaagtcgcatagggaaaacaacagatcccagcccaccaatcctggcaggagataccaagctgtacataaaaacagtgcttttctcaagcctggtattgggcacctattctttattgaaccctttattgtgaattgtcccacccaaccaggtaacaagttgtccagggcacctggacataatagctctattccactggcaccaccccatcccctctctgtctgtcttatctagactgtttttaatctgtctctgatttgctcttgatcaccaagcatgccttgttctcatctttcctgattcattatccctcttggcctccacaaccatgaaatacaagagctgtttactgccactcctgtcgaagcccacgtgtatcatcaccatatacatatatcattgggctgctagtggccataaaggcagagagcctatctgaacattaaagagacagagccttgatgatattgcttgactctctgaaaccagccacacctgaaaccagctatccctctgttgtgggttgaattgtattcccaaaacaatatgttgaagtcctcacctccggtacctgtgaatgtgccttcatttggacgtagggtgtttgcagatgtaatcaacttaagatgatgtcatacttcattagggtgggccctaatccatgatgacagctgtccttataagaagagaagaaatgcagagacaggcacacagggagagcctcagttgatgatgaaggcagagattggggtgatgagtttgcaagccaaggaaggcccaggattgttggcaacacccaaagctaagagaagggcatggaacagaatctccccaagtgccttcagaaggagccaaccttgctgccatcttggtttcagacctctagcctccagaactgtaagagagtaagtttctgttgttttaaaccacacgtgtttgtggtcatttcttagagcagcactaggaaaaaaatacaccctttcattttcccccccagttttgtaagccaatgcatttcctccttgcttaagcaaaattatgtttctcttacttacagctaaagtcctgaataatacatgtcacctacactatgctatgtgctgaggattcaaaggcaaatgagaccctgtccctacctttaagtcatccatcctgtggctctaagcccagcatcatctaaccttgctggggcctaaaccagtgagaaggacaaaaagaaactcaaagtcatgctgagatggcaatgtcttaccccaaataatgaaaagtatgtctctcaagcactgttcagacctctgatgaaagcaaggcatgattggcaaggaagagcaaatcagagacagaataaaggactcctgtctgtccactgagacacgcaaaaacatgactggataaaggccagtctccccagcctggcactgatggtttcagctttccttccttccttccttccttccttccttccttccttccttccttccttctttcctcccttccttccttccttctttccttccttccttccttccttccttccttccttccatcctccctccctcccttcctctctctcttttcctccttccttcctttcctccttccttccttcctccctcttctttctctttttctctctccttccttcctttcctctctctccttccttccttctttcctccctttctttccttccttcttctatttttctttccttccttccttccttccttcctctgcccttctctttctctctctccttccctctctctctctttcttttctgagacagggtctccctctgttgcccaggctggagtgcagtggcacaattttggctcactgaaacctctgcctccaggctcaagccatcctctcacctcagcctcccgagtagctaggactacaggtgtgcgccacgacgcctggataatttttatatttttagtagagacagggttttgccatgttgcccaggctggtctcaaactcctgagctcaagcaattctccagccttggcctctcaatgtgttaagattacaggtgtgagccactgcgtctggccgtctagcctatatttctatcatcatcttccactatatttggctctttctgaattctttccacctcctttgctccagtcacatcaaattactatttattccccgaagacgctatatgctttcaagagttgttagatttgctcaccatagctgtctacagagtcctttcctctatctctaagtcctagccatctatattagctccttagagctgccattaaaaaatgaccacaaactgggtggcttgtaccaaccaaaatgtattctttcacaattctggaagctgtaagtctgaaatcagggtgtcagcagggccatgctctctctgaagactctagggaaggactcttcatctcctctctctagtttctagtggctgccggaaatccttggccctccttggctggtagacacatcactccaacctctgcctttgttgttatgtgccatttcccctgtgtctgggtccaaatttccctcttcttataaggacaccagtcactggtttaggacctaccttaatccagtacgacttccatcttaacatggttatatttacaaagaccctatttccaagtaaggtcacattcacaggtaccaggggttaggaccccaaatctatttggggtacacaattcaacccacaacatcatcctttgaaacccagctcagtttgccacattctccaggaagtctccatcacctacctatggcatgaatgtctgatgctcccaatctctgctgtagctgcatcacctttgtccctgcggttgagatacttgtgaacttactaatttagagcttgtgagggacaggactggaactcaaaccttgtctgtatggtccaaagcccttggtcagtacctgtgttactcatcagaaaacaatctataagctgggcacagtggctcatccctgtaattccagcactttgggaggctgagatgggaagatcgtttgaggccaggaattcgagaccagcctgatcaacacagcaaaacactgtctctacacaacttttttttataaaaaattagctgagtgtgggggtagccatatagtctcagctactggggaggctgaggttgggagattacttgagccaaggagtttaaggctgcagtgagctatgatcatgccactgccctccagcctgggtgactgaatgagactctgtctcaaaaaaaagaaagaatgaacgaaagaaaagaaagaaagagagagagaaggaaggaaggaagaaagaaaggaaggaaggaaaagaaaggaagaaaggaaggaaagaaagaaagaaagagaaagaaagacaataatctataaatatttccctgtttaaattgaactgataaggagaaacaagataaggtgagggagagattagctgtatggtacattctgaaatgatttgcaagccattagaataaaatgaaagctgccctagtaagaactaaaatacagcttatctgctttagttcctcacttacaatagttggagttttggtctctcgcatcctttagatgggacagctttgaaatgctctaaagggctaagaagagtcttggagacccaagaatggccctgtccattggccgctctggcctcaagggtcaggggtggtggaacaatccccattccctctgctctggtgacaaccccagtcccactctctgactgccctgttggaaactcaaaactaaatacacaaacggaagaaattctgtgtcaggactgccatggggtagtctgggtccccatcgagcttcatgaaaaagttgttggccaggaaacagggtcgctggcccagagcctgcgcttgctccatccatgatctaagcatttaacagaaggagctactgctgtctgcctggagacaagcgagttaagaataactttgcagaggctgagctttacaggcctagccatcctgaaatagctgagacatgatcatccattaccttgatgcctgtctttcagggagacagttccagagactggcccaggaaaacaaattatatattcctcctcattaaaatgtctcagcaagacccttaaatcaggctttgaggtccaggttccaactacttctcagttagaatttctcctgggcgttttggtggttcttgccaaattgggtagttcccaatgtggggactgtttctaaatcagggtctgagagcaaccagcctccttaggaaaacgacgaaagaaattcaaatggaaaagaagtattaattagcccttatatagcacttcatggctttctcaggtgcaattttaagtgctttacatagataggtattgagatagactatattattgtcccatatgttctctgtacctctttgtgggaggattacacctccctaccatgttgacatcaagcttagccatgtaactgttttgccaaggaaatgtagacagaagacacatacatcattttcaagaagaagcctaaagagccgtttcatggatccaccatcaaccatacttcctgctgccctaacaccagcaatgatgtagataagggctcctccttcagtctggttccagagggaaaggctaaagccagcctgcaatggacatgtgatataagcaagaaatacatctttgttcctgtaagccaccgagtgtttggagttgtttgttatcacagaacaacttagtgtgagctattatcattatcaccatttaacaaatgaaggaaccaaggcagagactgtgcagcttaaagaatctcatccaaccaggaagtgggagaactaggattcacatctgggcagcctggcttcatagtccatgctctcaaccacttgactaattgcctctgaaagtgtctgttgttttccttcaaaactcctttagctgacagtatctccacgcatgccgtttttcttcatttcccatggaggtaattaagaataactggcagatcatttgtttctcagtaggtagaggagaccaggtagatgactctgtgtaagaaaacaacaggtggccgggcgtggtggctcatgcctgtaaccccagcactttgggaggccgaggtgggtggatcacaaggtcaggagatcaagaccagcctggccaacatggtgaaaccctgtctctactaaaaatacaaaaatcagctgggtgtggcggcgcatgactgtaatcccaactactctggaagcggaggcaagagaatctcttgaacctgggaggcggaggttgcggtgagccgagatcgcaccactgcattccagccagagctagactccgtctcaaaaaaaaaaaacaaaacaaaacataataggttactgaaggagccagactcattggtatgcaaaaccagaaacaactttattttttccatgtcgcagtcttgcaggaattaacaaactattcatcattagagatttaaaaactgagaccaagcctaatatcaaaacactaacttcccaactatttgaaagctgctctcctgcctcaggtttggaatttgcagtaggaagggagtcacggctggcttcctccttatttcccttccacgcctcctccactcacctggctacctcaagctcttgcaaaatgggggctgggagtggggtgggggtaagaggcagggaaaattctcacttggctttagtgccctctgggtttggcaggaggtcccatgttgcctctttgtgacaagggcctctatgatggatcccccagaaagtctgttgggacactgcatggcacccctttctggcccggggaacatactctctggctaaccacttttttttttttttgagacggagtcttgctctgtcgccagggtggagtgcagtggtgggatcttggttcactgcaacctctgcttcctgggttcaagcaattctcttgcctc[134 bp omitted]gcctcccaaagtgctgggattgcaggcttgagccaccgcgcctggcgtggctaaccacttctgatcttcctttcctccactccatcttccacatccaacctctttctcctggcacaaaaccctctcagaggcagtcccttttttgtgaaacagctctattgagacacagttggcatacaacaaactgcgcataattcaggtgcactattgggtaatttttgacttttgaagagacccatgaaccacaatcaagatagagaacacttttgtcactctcaaaagtttcttcacggcccttagtatttcctccctcccgtctttcccccgtcttcaggcagcactaatttgctttctggcatcattgatttgtctggtttcttacattcagcataattcctttcagattcatcatagggtgtgtgtgtgtggtgggggggctcttttttcaagataactgaagcacagccaccttctacaggtgcacagggcccacaggaaagtccactcatctgtgacctgccactcaatgcaagtgcagcatgttctgggcagctgctctgagctgcttcacttttatttcccaggcctagcaggctccagggtgaggcctcccagggcacacaggccaggctctctaagcccttgaaggtatatttctctgtcttgaggatggaaagggaatcccctactgccctgtgtaccccatcccagtacttgggggaatcgttccctttctgatctctgagtgaagttcttagcagcgcctatatagcctccagaggctgatactcaagagtccccacgctggcttttttggatcattcttaagcgaactctgcatagatgatttacagctgttctttagaccatgtgggcatctaacattttatgttctcagcttgggacctcatctgaaatggagacaacaggaaaatttggatgttaacatcctgtgatgataacttggaggttaaaggaggccattactggctgggcatggtggctcacacctgtaatcccagcactttgggaggccaaggcaggcggatcacaacgtcaggagttcgagaccagcctgaccaacatggtgaaagcccgtctctaccaaaaatagaaaaattagctgggcgtggtggcgtgcgcctgtaatcccagctactcaggaggctgaggcaggagaatcgcttgaacccgggaggcgggggttgcagtgagatcgcacccctgcactccagactgggtgacagagtgacactccatcgattgaaaaaaaaaaaaaaaaaaggaggctgttgcttagaaatgtccctaacccaagtgcccagacttcaccagctatgaggtcacaccgccatttgctgtcaaagtcacagtagccaagggccccagtccccttgaacacacaattttaccaggttctcctccatgagtcttctagtacactagcagaaatgctcatgagagctacaaatccacgcagatccccactccaccctcatcagctctgtgattctgcgtcacttccccactctcttctctccaaggacccctcctcagtctggagtctgactcctctggcagtggctgccctccctccagtatggcttcaccccaagcatggggcacagacaccctccctcgagtgttcccagcaaggctagagccgactttgccacataaggggactaaagaaaagccaaggtgacagaaaggacagaatggagggtctttacagaggtcccttccttagggttgccagatttagcaaataaaaataccggactcccagttaaatttgaatttcagatgagcaatgaataatttatttaatttaattattattattattttttgagatggagtctcaccctgtcacccaggctggagtgcaatggtgcaatctcagctcactgcaacctctgcctcccaggttctaatgattctcctgcctc[134 bp omitted]gcctcccaaagtactgggattacaggcgtgagccaccgcgcccggccatgaataatttttttacagtaagtatgtcccaggcaatatttggaatatagttacactgtaatattattcattgtttatctgaaattcaaatgtaactaggcatccagcattttatctggcaaccctgcctcttctgggtgtctctctgtagtctctgacatgtcctctgttgcagaatccaacttatttcccataacaagggagtcctggagaaaccctccctcctgtcttttcaacccgcaaagctccaagaacagggagcaggtttcccctccaagagtccaaggctccttccaagtccctaattctggccccaggatgactgatcatgaaatagtcattcctttcaggggaacccccagcccaagaatgtggtcttgtcctttgcctcctaatggcatgagaacaatactctgggatcagcacatttcctgaagtctatcttgcattgttgttcttttttattttattgtaaattgacaatttataattgtatatatttatggagcacaaggtgatgctatgatttatgaatataacacagatgaattaaatcaagctaattaaatgcttttcatttttgtgatgagaatatttgaaatgtactctcttagcaattttgaaatatacaatacactattattatctatattcaccatgctgcgcaatagatctcaaaaaaaaagtattccttctaagatttttgtaccctttcaccatcttctctccatttctcccatccccagcctctgtaaccaacattctactctctgcttctacaagttccattgtcttagagtctacatgtaagcgagaacatgtggtatttgtctttcagtgcctggcttatctcgcttagtaggatgttctttactttgttctctgttgtcacaaatgacagaatttccttctttttaaagactgaataacattccattgtgtctatatacattttctttattcattcatctgttgatggacacttatgttgatgctgtaatttggctgctgtgaggccctagggcacagtgataacaagggagtgcagacatctctttgagaaattgatttcaaatcttttgggtaaatagccagaagttggattgctgtatcatatggttattctacatcatatgcttattccatttttagtttttctttttctttttttttttttttgagacagtttcgctcttgttacccaggctggagtgcaatggtgcaatcttggctcaccacaacctctgcctctgggttcaagtgattctcctgcctcaggctcccaagtatctgggattacaggcacgcaccaccatgcctggctaattttgtatttttagtaga[155 bp omitted]tccataatagcggtgctgctttacatttccgcattccctttccccacttgcacagttgttcttgaataaccgggcctggggaaacgtcagtgggtgagtcaggttgctttaggctgtcatcatcctactgccttaggggacctctgtcagtctgggggcagagatttgactctagcagtttttcctgcatcttccgctctctgctcccagtcttggacaagactgcattacacatctccccagaagaaacaatacttttagaaatagggccgtcctacagctctgccctcaggaaagataatcatttctgttattaggcagaacacagcagtccccattccacaactggatgttgactttatctttacagaatcaaaggcccattaaagtattttccctaaatcaacactgcaagttgcccacaggctaaaacccccacctatgcctaaacataaggactgctgtgcatttaatatatcagtttttcctgcacagaatcatcaaactttcgtaaaatccagggcttcagtcttagccaagatctcaccagctcccccactgccatacataccactggggattcatccaatgaatagactggaaatctttgtatgaatgccttgctagattttttggttcaaaacacagtgatgcttccattggacagctctggtggcgctgaatgcaatgagctttccggataactgaagcttatctctacaaaacccaacactttattttatccattttgattggaatctgtcaaaactgtcacagcacagatctatgcctgctctttttttgagtttttctgtctcctttgtcttcaggctaccatatgggttgacactgtgctaactgtgtctacttctagcagcccctccctattttttattcgcagtggagaaggatgtgttaaaaaaaaaaagagtaaacagaatcacagggccttaagactttcttgcaagtaaagttcttgtgtttttttttttttttgtttgtttgttttttttttgagacagagtctctctctgtcccctggctggagtgcagtagcgcagtctcagctcactgcaacctctgctgcccaggttcaagcaattattctgcctcagcctcccaagtagctgggattacaggcgtgcgccaccgcgcctggctaatttttgtagtttttttagtag[143 bp omitted]ggttattcgaggggcttaaaaggttttgttttggttcatggcctaattttagctttccgtctttctgaaaagttaagatttcttcccttctgaataagtgggatgttattataatgaaatgcacaagttcctttagaacatgctatggcaagctatccaagttagagctgttgctgagggaaccaggcaaagcttgcttaatgtataaacctggttattatatttaaaattcaagcagcagccagagattcctatcgggagagggaagactttacttttgaagaggaaaagtacttaactcctagaggaaagcgtcattcctgaggtttaccctcatggtctggagacaaacacgtgggacttttcttttttgtgtgtgtttctaatagtggaagaaaaggaaagccaggctaagcagagaaaagtggaagaggagacacagcagctcattctttcccagtagccgttagactgattgcggaggggaaggtcaaaagagaagttcacaactatgataccagctctagaggcgaaagaacaactgagagagaactatccaagaagtgtttggatcccgaagcacaaaggtgaggaaagagcaaaatatggctttccctcataaaagaaaatacagctgacctctgaacaacaaagtggcgggcgtggggcgggggcggggggggggcggtttactcgcgccgacaaccacgcagctgaaaatccacgtacaattttttttttactcccccaaactttactaatagccttctgctgactggaagccatgctgatcacataaacaattaacacatattttgtgtgttatatgtattatatgttgtattcttacaataaagtaacctgactgggcacggtggctcacgcctgtaatcccaccactttgggaggccgaggcaggtggatcacgaggtcaggagtttgagatcagcctggccaacatggtgaaaccctgtctctactaaaaatacaaaatattagccgggcgtgatgatatgcacctgtagtaccagctactcgggaggctgaggcagaagaattgctttaacctgggaggcagaggttgcagtgagccaagatcgcaccactgcactccagcctgggtgacagagtgagactccgtctcggggaaaaattaaaaaaaaccatatatatatatatatatatatatatatatatatatatatatatatatatattagtaagccaaaggccgggtgcggtggctcatgcctataatcccagcactttgggaggccaaggtgggtggatcacttgaggtaaggagttcaagaccagcctggccaacgtggtgaaaacccatctaaaaatacaaaaattagccgggtgtggtggtgtgtgcctgtaatctcagctacttgggggctgaggcaggaaaatcgcttgaacccaggagaaggaggttgcagtgagctaagatagtgccactgcactccagcctgggcaacagaccctctctcaaaaaaacaaaaaccaaaaagcccccaaaaaacccaataaagtaagccacagaaaataaaatgttattaagaaaatcgtaaggggccaggcacagtggcatacgcctgtagtcccagctactccggaggctaaggcagaagaatcgcttcaatccaggaggcggaggttgtggtgaaccaagatcacaccacggcactccagcctgggcaaaggagctatactctatctcaaaaaagaaaaagaaaaaaagaaaaaaaagagaaaaaaatcataaggaagataaaatatatttgctactccttaagtggaagtagatcatcataaggttcttcatcctcatcaccttcacattgagtaggctgaggaggaagaggaagaggaggggttggtcttgctatctcagaggtggaagaaaatccacgtatatggtggacctgcacagttcaaatccgtgttgttcaagagtcaactgtaggttaaacaattaaaacgtcgaggtcaaaggatgaagacattaagttatcctcgtctcaagctaatgtctccttcccagacttctccctcccgccgccctcaccctcacccaccaccctgatgcctgtgggaggggaaccacaataggccaaagaatcctagatttcaaaagatcacccagtttgtcatggttatttaaccgttgcagaaaccaaggcccgcagagctcagggaggaattcgagtcctcactcctaatccagcatgctttcccactgtatcatccagggcagggacatccctggaaaattcagcaatgttctcacttaatagtactccgcccccagacttatacagagcaatctttatttatttatttatttatttttttgagaaggagtcttgctctgttgcccaggctggagtgcagtggtgcaatctcggctcactgcaagctccacctcctgggttcacgccattctcctgcctcagcctcctcagtagctgggactacaggtgcctgccaccgcgcctggctaattttttgtatttttagtagagacgggatttcaccgtggtctcgatctcctgacctcatgatccgcccacctcggcctcccaaagtgctgggattacagacttgagccactgcgcccggccgagagcaatctttccaaagtttgctccacaaaacactagcccaggagatgctctatcatccagcaatttcacttctgaatcgaagtggggactggaacagatatgtatgctcccctgttcacaacatcatgattcacaatagccaagaggaagaaacaaccctaatctccatcaatggataagtggatagataaaatgtagcatatacatatggtcctacaattattcagccttaataggaaggatattctgacacttggtgcaacacagatgaagcttgagaacattatgctaagtgaaataagtccaacataaaagcacaaatattacacaattctgcttatatgaggtagctggagtagtcaaatgcataaagacagaaagtagaatggtgcttgctaggagccaggagatcagggaatggggagttactgtttaatggatacagagtttcagtttggaaagatgaaaaagctgtgcagatggatgatagtgatgattgcacattgttacagcgtgaagatacttaatgcccccggaatggtaaactttgtgttacatattattttaccagaatttttaaaaggaggacaaaatgagaagtgtttcactaattaatggtatcaccaaacaagcaagtctggggaggtctgattacattttcctacacacacacacacacacacacacacacacacacttgccctggcaagtcacagtgcacattcaataaaagacccagagcagtcctaaatcaaagactatttaattcaatttaatcaagcatttcctcaacagaacacagagccctttttatttttgtggaacatgattaacagcccacatccatggtgcgtcccttgggaaatgctgataaggagcttcatactgctcaaagcatttcctctgctagtacctcactgaatacttcctgctggccaaaaagacagtccctaacagttagagctccagaatctttattgactattggacagtcagtgagttagtcattaattgtctccattttattgatgaagaaactgtggcccaggaaagtcaagccctaacccaaggtactgcaaagctgctctgccaagatcagtggtagagccacaccaaaaccccagttttctaaaccctgtcctgggctgtgcctccccaaacccagtgctgatcccctgatgctccttctgggtgtccaggtgtaagcaaagcaagttcatagaagagcctcagagctctggggttgctgggaacaccaaaggggacagaaggactcagggaccataggcccccttaaaggttagtgctccaagccccagtctctcttttctcctcctttctgcaaaacagggctagggaagctcagagatatcctgtcaccaacaagcaatccctgacttttcctgatgtaagaatgtaatacacccctgacatcataagactcgtccagggtgcagattaagatatagactcccaggcctgcctcctggagattctgattgaatacgtctggggcagaacttgggaatgttttaaacaaacatcccaaggaatcttatcttggaggaagagtgagtacccctgaccttcacactaaaagggacctcaacagaataccttctggctcagctccttgccccacgggtaagacagctgagtctccacagagcctgcgtgactgtccaagttcacatggctacttttttccaaaggctttaaaaacacaaacaaaagcccaatgttcatttccttgaggaaagaggcaggtctaatttttaaaataagaattgatttctatgctcctctgtcccagcacaccctacatcattccatccctccctgcccagcggagaccacttctcagggctctcctgcccctgtcctgttcattgcgagcaggtccaaccactctggaaaatgtcccggccatctccctcactatagacctaaccgactgcagtgttgatccaacttgctttctgagcgttgatggagaccaaatgctgtttggcttttgccccgcccgccccatttccatctgagtagcagtcagaccatctcaggctcgaactatgctgcaggaggaagccggcagccgagttctcccttcccaaggagcttacccccaccctcccggctggagaacctgccaccccagcccaacgcatgagacagatgacccagacaaggccgggcacacacacagcattccgtcgtcacttggcaggtccttgtcaaagagcagatggaaaagtctgaggacactcaattccccaaattccttttctgagagctctaccctgtctcagctccaaaaaaattagtcttttcagactagttaaaacccagcctccctacttacatacacatcaattttctttgctttgggtcccaggaagggggcactgaagcgatcctctttttgtggccccagagttgtctgcctgtctccctgcctggtgagggttgctgctcctaatcagaaggtcttacgggccacaggttcatctcaggggggcctcaatgctccccgtggccccggagtccttgccagccacaggagcacagcttggagtcgcagatctgacttcaaaccttggctttctggctgcgcgatgggattgttgaatccttctggacctgcttgcgcatttgtaaagtggggagaatcttcttcccaccattcaaatggggagaaaatcatctactttgcaaggttgtcatgataattaaacaagatgctgtgtgcaaagcgcttggcatacagctaaacaaatgctcaggaaacagaggtgaccatgatttccttgagctctccagacttctgtcaccttcacctggctcccctttgccacaaagaaagccaggtaacctgagatgggacccagattatggccatcatacagcctacattagaggtcttaatttgtgagttttcatgtaagatatacatgagggatataagaacacctgaaatttgatctaagaatgtgtaatttgacccttttttttttggagacaggctctcactttgtcacccaggttggagtacagtggcgggatctctgcccactgcagcctcaacctcccaggttcaagcaaccctccttcctcagttcccccaagtagctgggactacaggcacgtgccaccatgccctgctaatttttgtattttttgtacagatgggatctcgccattttgcccaggctggtggcatgacccaccatgcctggcctgtaatttgatcttttcttttcttttcttttccttccttcctttctttccttccttcctctctttctttctctctctcttttctttttttttcagagatctgtctctgtcacccaggctggagttcaatggcgcaatctcagctcattgcaacctctaccttctgggttcaagtaattctcctgcctcagccttccgagtggctgggactacaggcactcgccaccacacccagctaatttttgtatttttagtagacacggggtttcaccatgctggtcaggctgatctcgaactcctacaggccactgcacccagccatgtagtttgatctttattgctaaattgtatcccgggaaggttgcatcagtttatacttgcatctccaatgtaagaaagtgcctggcctccctgccccctcaccaacaaggcctatccaggtcgagtattccttatctagaagtgctttggatttgggatttttttcagattctgtaatatttgcatatacaaatgagatattctggggatgggacccaagtctaaacacagaaattcatgtacaccttatacacatagcctgaagataatttgatataatattttaaataattttgcgcatgaaacaaaattggtgttaagtacttatgtgtggagttctccacttgtggcatcatgatggagctcaaaagctttggatattggagcattttggattttggagttttggattagggatgctcaacctgtagcaacactttctttttctttttttcttttttttttgtcgcccaggctggagtgcagtggcgtgatctcagctcactgcaacctctgtctcctgggttcaagcaattctcctgcctcagcctcctcagtagctgagattacaggcgcgcaccactacactggctaatttttgtgtttttagtagagacagggtttcatcatgttagccaggctgatctcgaactcctgacctcgagtgatccacctgcctcggcctcccaaagtgctgggattactggcgtaagccaccacacccggcctgtagcaacatttttaaaggcaacaccagttcaaagaattacctcattgttgttctgattggtgaatttgtgattagtggtgaggttgaagttttttcatatatattggacaattgtatttcttcttttgtgatattctttttttttttttttgagactgagtttcactcttgttgcccaggctggagtgcagtggctcaatcttggctcattgaaacctccacctcccggattcaagtaattctcatgcctcagcctcccgcgtagctgggattacaggcatgcaccaccacacctggctaattttgtatttttattagagacggcgtttcaccatgctggtcaggctggtctcagactcctgacctcaggtgattcatccaccttggcctcccaaagtgctaggattacaggcatgagccaccacgcccagcccttttgtgatattcttattcctgtcctttgtttatttttctaaggcttctttattttttgttaatttacaatattaagattgtgttaacttataattaatttattaatttataattttatataaaatataaatcatttatataaatataaattctgtcctacatgaggtaaatttttttctgacttttaacattgactttcatgtcttctgaaattttacatttttagttggtcagagcaatctcttcttttgtgatgtctgcttttgatattatactaaagaccttcaccccaagattatataaatatttacttatatttcattctagtatttttcttttctttcatagattagtactgttagttcatctagaaccatgctgtgccctaatggctatgtaaatttaaatttcaagcaattaaaattaaaaagtgtggctcctcagtgtactagctccatttcaaatgctcagtagccatttgtggctagtggctgccatgttgagaagcacaggtgtagaatatctccaccttcacagaaaattctacttctactggacagagctgatctagaatttatttcgtgaaccatgcagaagggcagggaatccaacattgttcaaaagagttcatgtaattgtttcaatatcatcttttgaataattcatcactttgatcctgatttgagatgctacgtttactattcataagtctagtaatacatacttggctccatttctgtacttcctactctttctttatctatcttcctaatcctcaccaggaccacacagtttcaactatgataattttacaacatattttaatgtttagtagagcaaatttttttatttatttcttattcttttttaaaaaaatcatgggcaattctcacacttacgtttccaaactttaaaataattccgtagttaggagttggaattgcatccatacaataaatcaactcatgaagggctgttacttgtcacctgtttccccaacttcctgcactttccatcaaaccctgcactctaactagacttagccagttgcttttccaccagcacacaccagggcacgctcctcactgtgccctcactccccaggctggtccactaggaaattccacttgtcctgttagctcaaagctccctttctctgtgaagccctttctgatacctctggacagaggtaggtgcttctcccaatttcttttgtccattcctatgttggaacaattatcttgttattttacatttgtttgtttacaagtgtgacttctcactatgataaacaatctgaggacaagtactgtgtcctttccattttgaatttccagaacctaccaatagcactttggctcaacaaaaatgtattgaatcaaaaagcataactcaagtcacactggaaaagttagctacaaccttgaatgtaggtatctgcaggctttgcctaggacagagctgtactgtgttcatttaatctggcagtgatgttttaactgaattggggtgtggaggtgataggaagccaagagactagttaagaggccatcagacgggttcaaggcagacagagtaaaggcctgaataaaggatggctgctagggcttgggaaggaggagacattgttgagggatgacgcagggttagaattgttgggagactgaagacagacagagccaaaaatgtgaccagggacctaacagcgtctttctgcaatttattctcatggacttttcaatacttgtaagtgtttttgtgtcattcacaaacattacaattttaccatatttactatgaaattttactataaaatcaaaatgaattattgtaatgtcaccaacgattgttctagaactagcttagtcaagtcacttaaactctttgtaactgtttcctcatctgtaaaattggtatcacactattacttcccttagagggctgtggtgaggctaagatgagctaatacttgtaatgtgcttagagcaatgccttgcacataataaaagctcaatgatcactggctattttattttgttttattttttgagacagagcctctgtctgtcacccaggctagcgtgcagtggcgccacctcagctcactgcaacctctgcctcccgggttccagcgagtctcctgtctcagcctcccgagtagctgggattacaggcatgccccaccaatttttagtaaagatgggatttcaccgtctcttggccaggctggtctcgaactcctggcctctcagcctcccaaagtgctaggattacaggcataagtactgtgcccggcccattggctatttgaaagattattattcatacgtttccatccagagaagcacccatttatccttgccactaaggtagcttcctacctgtgacaaaaaaccaccaaccatccaatgactcatggagccttacatggcaccacttgtcaaagactttttgaaggctgaagtctattacatgtatatatgcatgcaattgggcaaagaaactgtctttcccctgtgaagttaggtttgttcaaggatctcgttacctcgctctgttcagaggtgtacctggtaaaaattggtctctgtctcctttgagaggcaacgtggtgcagctgaacaaggatggagctcttggagttcagggtgtaattaggggatggagggccatctagatggagaagtgagaagaggccaccccaaaacagatccactcctgtcccaggagaagtccagaatgctattttcctacacggctctggggtgggttagtttcactgcttccatcatccaccagaagaatgtgagtgggagagggaggaactggaggttgtagccatcttcttcttgcctccagagagggatccaagaaaagctgtgatgcccctgctagccagaaactgctactgtcagcagattttaaaatcccgagaattcaggtcaaaggcatctcattctacacattgctttgtagaatcctcagaatctatgggctgcagtgcagctactggctgtgttggcttcatttcacccatttttatgatgaatcctgccatattccccagaaagaaagtgagacatgctgatgtgtttattacataagagccatgattacagctgttaccatcttgtgagaagaaagtgagaggttccagggtgtctgtcacaggttgtaccaccttgctcataatgaaaatgagatatacctctgtatttattattgattttgtcctcttactcagaatgagggtgagaggtgtcactgtctgcagcaaagcttctactggtcctccttgtgaatggaggctaaagtggcaacgttcaatgccaagtcagttgagctggaacgttctctctcatcggttccgctcttgcctctagacttgcctgtctcaggcctccaggacaagattctgactttgaggtctttggttagcatttccacgttcacaaggggtcacactaacagttaatgcctttgtgctgaaacaaggtcttcactgtgcctctttgggcgaaaacaaaatccctagacacagagttgacttccagaaaaggctcccgtgctaagtcagccaacagactccagagctaatcggaaccagatgtgagttctttcacttaaatatattacaggtcacagatttattttttgaaagcacctataacaacaattaaagtcataaaatgtgttttccctggatattttctcatagtcgaccaagcgatatagtctgataagttggggctaacctatgccaaaatcaacatatttgctttgttcgaaatctgcagaatatgtctgtctgcggaggtgcgctctggtcaggccagggacagctgccaacatacaaacagtttcctaaaatatcccctgcatgcaggaacgataagcagaccccatagatctgtggctgagaggtggggagagaaaagcctgggggagagaaatagaatgagtggcattaagcataattcgggtaatttggcagatacttcctgcgtttaaaaaatggagtctataaagagttcagcaatggccgacaactttctccataccagtatcgctgccaaagttcagatgctgggctgatgtccacctctgggaaggactgctagcaaattcatgagttgttctttcatctaaagtctcttaccaagaaattgtttttgggaagagtggtccatggaaacgggtctggcttccaacgctacacgccagcaagcagggacctccctgtccccatgatcgcccgccggttttggggcttgttcctttacttttgggcacca[276 bp omitted]ggcctcccaaagtgctggaataccggcgtaagccaccatccctggccccaaaatttcccattttccaacagtagactctgaatgccatctggtcatagcctgttttttgtgtttcctttttcttttcttcttcttcttttttaaaatataattcaacccaactttattttattttttatttaaattatactcttaagttttcggttacacgtacaggatgtgcagttctgttacataggtatacacgtgccatggtggtttgctgcacccatcaacctgtcacctacattaggtatttctcctgttatctgtcccctagccccccaccccccacagtccctggtgtgtgatgtttccctccctgtgtccatgagttttcattgttcaactcctacttatgagtgagaacgtgcggtgtttggtttgctgatcttgtgacagtttgctgagaatgatgatttccagcttcatccatgtccctgcaaaggacatgaactcatccttttttatggctgcatagtattccatggtgtatatatgtcacattttcttaatccagtctatcactgatggacacttgggttggttccaagtctttgttattgtgaatagtgccgcaataaacatacatgtgcatgtgtctttatcgtagaatgatttataatcctttgggtatatacccagtaatgggattgctgggtcaaatggtatttctagttctagatccttgaggaatcaccacactgtcttccacaatggttgaattagtttacactcccaccaacagtgtaaaagcgttcctatttttccacaagtgttttgtttttcttatatgcactttgggaactcttcttggcattaattatctttttaattaattaattattttttgagagaaggtcttgctctgtcacccaggctggaatgcagtggcacaatcatggttcactgccacctcgaactccagggctcaagaaatccttccgcttcagcctcctgagtagctgggactacaggtgcaccactgtgactggctaaattaaacaaaatttttttttttttttttttttttttgttaaagatggagtcttgcttgcctaggctggactgtaactcctgggcttaagggattctcccgcctcggccgcccaaagtgctgggattacaggtgtgagccactcgtgcttggctgacactgattgtctttgatgtccagtttccattcttcctgcttttggtaatagtcgcccatttccatccggcaaaatacccctccccactcccagtcctgtgacccacaggggttgctaacactccactctctcccacccccaccaccatcaccacacacaccccccatgtaccttgggtcatacatgccctaagccttgccaaaagaaaaggatgaattcagtgaacacctatgatcagtggagcttttagacttcaggtcctttcttcttagaaattaatttcttaaaatagtgaatacattcacatggttccagaaaaagcatgggaagttgaatagtaataaaatagaaaactataaatcaaaaagtaaataaattgaaaatttgataacagaacaagacatttgcatagtcttcaagtgcttccccacaaaatctcatttgttagaaagggaaaaagaggaattttgccaaggagaaccctggcagacaccacattaataaagcgattaatgttaatgtcatcggtaatgggacaaattgtaattgtgtgccgattgatagatgcaatgagaaggtcatatgtcactcctgtgatattcccgccaaagatttgtaagctgaatcta[132 bp omitted]gaaaccctgtctctactaaaaatacaaaaattagctgggcgtggtggtgcctgcttgtagtctcagctacttgggaggctggggcatgagaaccgcttgaacctgggaggcagaggctgcactgagtcaagattgtgccaccgcactccagcctgggcaacagagcaagaccccgtctgattattggcctgtaatctctctggtcttgaaggctacgaaaagactgagaaacgatccagattgaaagagaatgaaggcaacatatgattatgaagtggatccttttgctataaaggacattatcgggacacttgaaaggtagaaatatatcagtgttaatttcctgatcttgttgattgtattgtgcatatgtgggggtttccctgtaggaatttagatactaaagtatccacaggtgatggggcatcatatcaacaacttactttcaaatggttcaggagaaaaagatatttttttaccatgcttgtagcttttgtgtaaatttgagattgtttcaaaatttaaaaaatggtttcaaattatctagtacaaaattttccctctaatcactgagtttcatctgcctagtccttccccaataaggggtaaccatgaatcctggtacgttctttagagattttattttcaatgtatctgtaggaataaataagccatgcccacaacataagaggcactcttttttttttttttttttttttttttttttgagatggagtcttgctctgtcgccaggctggagtgcagtggcgcaatctcggctcactgcaacctccacctcccgggttcaagcggttctcctgcctcagcctcccgagtagctgggattacaggcacatgccaccatgcccagctaatttttgtatttttagtggagaccatcctggctaacacggtgaaaccctgtctctactaaaaatacaaaaaattcgccgggtgtggtggcggtgggctgtagtcccagctattcgggaggctgaggcaggagaatggcatgaacccgggaggcggagcttgcagtgagccgagatcacaccaccgcactccagcctgggcaacagagcgagactccgtctcagaaaaaaaaaaaaaaaaaaaaaaaaaaaaaaaagcaaaaagatcattccgtgtaggaaataaaaaattatggggttagggtaaggttaaagatagaagatcatttagaagtcttctgttttgtccctgggattctcatctctggaaatcaaatcttcctttaaaaataaacacaaaaccacgtttctgtagtaaaaggcagagtaatggcacattcttacacactttgactcagcagacacagagactgacccgaagaaaccacaacaactaagaaatgcatttgggttgtggtggtgtctcgatttctttaagaacaatagggcccggcgcggtg[131 bp omitted]ggtggcaggctagtcccagctactcgggaggc[136 bp omitted]atcattgagcaagaaaggttcaattctagtgaattttgtcaaaacaaacaatgatagaaacggtcagccttaagtataaattgacatttctatttctagagataaaaaattgcttccaactcttagctgacagtccccactcttgctgcctcaaagtttcacagtttataaggtcccctcttcacccctccttacactggtatttttcaccccacctggccaagggaaggcattggcaagcacacctccagtagctagtgatgcgttttagaatgttcccatttttatcctccctcctacactgtctcctttctctcaattcatctccccagtgtcttttctatttgggttaccttcatgcttttttctcctgggttccattatttttataaattttagttaatcttttattttattttttagatggagtctctctctgtcacccaggctggagtgcagtggtgtgatcttggctcactgcaacctcagcctcctgggttcaagcaattctcctgcctcagcctcctgagtagctgggactacaggtgtgtgccaccacatccagctaatttttgtgtttttagtagagacggggtcaggctgaccatattggtcaggctggtctcgaactcctgaactcaggtgatccactcacctcagcctaccaaagttctgggattacaggtatgagccaccacccggccatctcctgggttctattattgtttggctgcccttaatgactgtgggctccgggccaatagtacaaacagaggcctgtcctgctatctttctaaatatttagaaattgtaaaccaaggcatcaaactgttaaataaaataggttcttacttcttaccatggtattcaccttcataacaacctgagaggccaggtttgaattcagaattctcatacttctcgaaaaatcatgctagaatatgaaagcgcagagagagcctgccattgccgacctctggctgcagccgtccacccttctcttcctaccctttgcaacatctggtatcacaaggagcctcttgtgcatagctatggacacccagcccacaagtctagcctccatactcctgcacctccatccctactgccagcttcatcctgaccacccctcaggcctaggggtgggtaccactctgctgtaagagtcacccttgagggatggaataaggcaacaggcccctgtaagccctggaaatgggcctgaggccatttggacagagaattctggggtcctggtaccagaagtgtggtctaaaagggaggagaaacacagaacaagttcctcccctcccttcttcccctctctctccccttccctctcctttcctccacccccctcccctcccctcctctcttaaccctcccctcccctttcctcctctcccctcccctctcctccccactcccttcccctgccctctcctccccactcccttcccctcccctcccctgccctctcctctcctccccctcccctccccgtcctcccatcctctcccttcccctttcctcccctcccctctctttacccctcccctccccttcctccccttcccctcccctcctttcgcctcccctcttctccactcccttccccttccctcctcttcccactctcccctctcctcccctcccatcccctttcccccgccatctcctcccttcccaccccctctcccccgccatctcctcccctctcttccccctccacccctctcctcccctcccctcccctctcctctcccctcccctctccccctccccctccccacctctcctcccctcctttggtcctgaagaatcctttaccctttggaagcaggaggagagccagagtggggggccctgctgcctagatccaagggcagtactgatggtcttgataaattgtattactagatttcctgatattcatccatccttgtgattctggaataaaccctgcttagtcatggttttttttaaatatactgctggattccatttgctaatgttctacataggaattttccatccatattcatgagtgaaattgatctccagtcttcttcatttgtgctaacattgtcaggtttcaatatcagggttatgctagttttgtaaattgaattgggaaactttccatgctcttctatgttctttaacagttattttgttctttttaatttgcaaggcatttataaaaacattctcattgtaaaaaacattcaaaccatgcagaaaaagataaattccccttgacttccctttacattctaatccctgtctagaaataatcactgttagccatgtgctgtgtattctcctagagcttttcacttctatacatacatgtagctgtctatgatttggtactttttctttacctaaatgggattaaattctacatactaaattacaagtttttatgttttctgctctccttccttccctccctccctctctcctttctttctttccctttctttctcttttctttctctttctttctttttctttcttttttttctttctttctttctctttctttccttctctctctctctctctctttcttgacagaatcttgctctgttgtccaggtgacagtgcagtggtatgatctcggctcactgcaacctccgcctcccaggttcaagcaattctcctgcctc[132 bp omitted]ctcagcctcccaacatgccaggattacaggcgtgagccactgagcccggcctttttcttttttgagacagaatctcattctgtcaccccaggctggtgcactggtgccatcactgcccactgcagcctcaacctctaaggctcaagcgattctcccacctcagtctcttgaggtggtgtgcacctgtagcctcagctagttttttaattttttaattttaattttaatttcgtagagatgagggtctccccatgttgcccaggctggtcttgaactcttgggctcaagcagtcatcttcctctgttgcccaggctggtctcaaactcttgggctcaagcaattctcccgtctcggtgtcccaaagtgctgggattataggcatgaaccactgtgcccagctggttttgtgcatttttttaaacctaaatttatgtgttggagagctcaccatgtcaatacatgtagacttatctcttccttttaaaatacaacataatattccataatatagacattttaatttaaaactatttcccacttgagggacatttaagtgggttccaatttttcttcattattattctgtattaactattttatcataacacttattactgcctaactttatctgatttaatcttttgtttgttggattgttcatttgtttactgttctgtttccttccattagaacttcaacttcttccaagcaaaacctttttctgtcctgttcctgctgtgcttaaaattgtgtctggcacatagtaggcactcaataaatgttcactgactaaattaatcaatgaaagaacctttgtaaaaggctctttggccacacatgctactgtttcttcagattaggtactagaagtggaagacctgagtcaaagtttgcaggcatttaaaattttcatagattctgtcaaattgacctgcagtctgaccagtttatacttccacaagtaacaagagaatccacctcctcatactcttgccaacatacgttattaactagtttaacttttaatccaatttatgagcttaaaacattgtatcttggtgggcacagtggctagcacctgtagtcccagctcctcaggatgctgaggcgggagaattgcttgagcccagaagttcaaggctataggagttatgatggtaccactgcattccagcgtgggtgacacagtgaggtcccatctcttaaaaaaaaaaaaaaaacagtatgtggccaggcgcggtggctcacgcctgtaatccaaacactttgggaagctgaggcgggcggatcaccagaggccaggagtttgagaccagcctgaccaacatggtgagacccccgtctctactaaaaatgcaaaaattagctgggcgcggtggcgcgcgcctgcagtcccagctattcgggaggctgaagcagaagaatcgcttgaacccaggaggcggaggttgcagtgagctgagaccgtgccacttgtactccagcctggtgacagagcaagactctgtccccgtcccaccccccaaaaaatcttattgttgttttaatttgtacttctttgattactactgcaattgatgctgttttgtttctttgcgagttggaaatccttttctgttaattatttgttggtgcattttgtccttttcccccctactcagttacttgtatttttcttactaatttatgggagattttaatgttttttggaaaaaacatttgtcaaatatctggccaatatttcctcctaacctgttgcttttgacttaattttgtttatggtatcttttcagtctgtattatctaaattatattttaatgagtcaaatttattgggttttgtttccagtttaaatcttgtttaatatttattgactcacatctggtgaatagtgagaaatgtagcaaccagaaaggatatcttttcaaattgatttttttttttttttttttttttttgagacggagtctcgctctgtcgcccaggctggagtacagtggcccgatctcagctcactgcaaactctaccacccggcttcacgccattctcctgcctc[175 bp omitted]cccggccactatttttcttttaattctagtagaatatggctttcttcatatgctaaataagggattttttcctatgtacaaaatgtaacaacgtttttaaacttatttggcattatttttcatttctttctgttgttcacaggtagacttacaaaggatgaaattgatctctactactaagtggatccatcttcaagagagggcgttcagaacacccggaaagataagaaaggtgaaggcaccaaacggccctttggagggcagactcccattctgggtggagggtctgattcccaccaatgatctggaatctctcaattatatttgcttgggagaataaggagttaaaacaggttaggtcttggactaggtctatagcatttttacatgcagtgtttttgtttcttagtctaaatttatttattgacagggtttcagtcctgttgtctaggctggagtgcagtggcacaaccaccgctcactgcagccccaacttcccaggcacaggtgattctcccacctacctcagcctcccgagtagctgggactgcaccatgccctgctaattttttgtagaaacagggttttgccatgttactcaggcttgtctcgaactcctggactgaagcaatccacctgccttggcctctcaagtgctgggattacaggcatcagccactgtgcctggctttgtctaaatttataaacccataaattgaatctcatttttctcacaataacaccatcccaatctacgtcatcctaatctacattagtgcttggtactaagtatttgtctacaacccctccttttcccattcctccacttccttctcttttatattattattattattatttctggataaccagtagcccttttgagaaaagcctgatgctcaaggtcagtggttctcagctggggtatgcacatcagaatcgcttgggcagcttgaaaaaaaatacactcctgggctctaccctagatttgaggaatcagaatcatagggggaaggatcaggaattctgaaatgtttaaaatcttcccaggtgatcctgatgtgcagagttgagaatacctcaggtattttaacacacggctttatctttgaagaacagaagagaccccatggggatacagtcagccaatgtgactaattctacaggacaaatgacccagtttcctcaaaaataagtgccatgaaatatatggagcagggaggtggaaactgtcataaatcaaaagacttgagatgtgtcaaccaagtgaaacgtgtaaaccttatttgggtcccaatctgaacagaccgaaaatgggcatttttgagacacttagggaaaacagaacacagattatttaatacgagggaattatttttgttggatatgatattggcacagtgattgaaaaacaaattccttatctgttagagcaaaatactgatgaatttatgggtgaaataatgtatctgaaatttactgggcttggtggctcaggcctgtaatcccagaactttgggaggctg[134 bp omitted]gaggcaggagaatccttgaacctgggaggcggaggttgcagtgagccgagatcgtgccactgcgctccagccaggcaacagagcgagactccgtctcaaaaaaaaaaaaaagaaaaaaagaaaaaaaaaattagtcgggtgtggcgacgctcacctgtagtcccagctacttgggaggctgaggcaggagaatcacttgaacccgggatgcagactttgcagtgagccgagatcgcgccactgcactccagcttgggtgacagcgatactcgatctcaaaacaaaacaatacatatatagagagagagtgaaaaaaaaatcttatggaaaacaaacaaaaaaagaaacaaccatgtgggaggaaatgatgaagtaagaacacagtgttgataattgtgaaaactgggatgacaggtatgaggaggttcttagtactatttacttttgtgtatgtttgaacatttcaacaataaaaacattttaaaacaatgacatcatccatagacctgaactcctcccaagtctagttttcctgatccagactcccccaggccttgtcagcccttccttttggtgggttcttagttccttcggggcgtacctgattggatcaagaaactttatacaaacttttcctccttgcctgcttcttgcccctgggagtgcagtggaaaactagagccagagaggcagtttgctgcggatgcttcacatcctctgtaatatagtgacactggctgttggtaccagagcggggcgacttacccacctgcaaacctagcccagacctcccctccatccgctccgccagtggtgcagcacgtgagcgctcggttggaacatcaggagtgtgaattccaagagcagctgtggaactgagccttgtaaaaattccttgtaggggagaggggagtgtggtgtcatcaaagcaagcaggtgaaacaaaaagacagggtgttctcttactgaaatacatcagggaggcggggtgtggtggctcccgcctataatcccagcaccttgggaggccgaggcgggcagatcacttgagtccaggagtttgggactaacctggaccacatggcaaaaccctgtctctacaaaataatacaaaaatgagcctggtatcatcgctcctgcctgtagtcccagctactcaggagtttggggtgggaggatcgcttgagtccaggaggtcgaggctgcagtgagctgtgatggacccactaccctccagcctggatgactgagggagaccttgtctcagaaaaaaaaaaagaaagaaagaaagaaagaaaagaacagaacagaaaagaaatcatcagcgagaagagcaagaatcattctaatctggcctgagtgaaaaaggagccccaaggtagctaggaactggtttctctctattttgtcttaaaaagttattgctttccaaacttggttttcttgacttttaaattaagggttgactctatgtgtgtatgtttaataaagaggatgagaggaaagggataatacataatcgtatgctatgtaactataattttatatttttctaagttattttatattctgtatttatactttacattctatcttatagaaatataattttatagtaacacatgctctaactgcagtcggactgtcccagcgttgtgacaaaagtcccactggtggcagctttccctacatccaggccagatgcctcagtagacatcagcagcctcttgaactccaatctctcaagtccaattccattaagtgctgtcaacagagaatgcacaggggcaaaaccctctctctggactctctcacctggcctcttggcttttcctggatttgccaacccgttcccacaccccagctttctgattcatgctccttctaccttcactcctctaa[135 bp omitted]gcaatctccgcctcccaggttcaagcaattctcctgtctcagcctcctgagtagctggaattacaggtgcccgccaccacgcccagctaatttttgtatttttggtagagacagggtttcaccatgttggctaggctggtgtcgaactcctgacctcgtgatccacccgcctaggcctcccaaagtgctgggattacagacgtgagccactacatccggtctcacccctcttctaagctcaaattcctcttccttctgattctgctcaaaagaatgtagaaagtggagtggtgagataggcagaagcttgaacccacatgctgcttgctttctgggttggagacaccccactgttcactcagccatcctccttttctatttttccttcctgctgaacagagagtggctgctggcctctttccctgtgcgttctccacctaatctttggaccaacggcaattttgtgctcttattaaatgaaggagcatgcatggaaaaccacttctgggtggcccacaatggggacaagaggaacaccacgttgcttgtgtcaaatcaaggattgtgccaagggcgtttctctgcaccacctgaagtgccctcttggagttgtcttgccaggtttagccttgacctcccaggaaaagacaaatggcagtgagtaccttcatagttgagtggtatggaaggcaatggtgttgcttatgcaacacaattctgggattgcattccagcttccccacatagtggttgtgggacctcggccaagggatttagcctctctgagcctcagttcttttatctttaaagtgggcagagtaacagaaccaaaggaaataacatgtcttccttgccaagcatggttcagtgcatagcaattgttcagcagtataactattttataaacgattctatttgatctttattaaacttctctacctcctgattttgtggttgaagagaaactgggttttaagaaattatagtccgggcgcagtggctcatgcctgtaatcccagcactttgggaggctgaggtgggtggatgacctgaggtcaggagttcaagaccagcctggccaacatggtgaaaccttgtctctactgaaaatacaaaaattagccagtcgtggtggtgatggttgcctgtaatctccgctactctggagcctgaggtaggagaatcatttgagcctgggaggcggacgttgcagtgagccgagattgtgccactgcactccagcctgggcaatagtgtgagactctgtctcaaaagaaagaaaagaaatcagaagcatgaatagcagggcccctggtcattcaggacagagccaggcaggagttagggttccaactcccaggccaaggctcatcctaatcctccaacaagagacccttttagcactctggccagtgggtttacttaggagaccggagaatgccccaggttggggaatcaggagctggtggtctcaggtcagacaatccagaaagagtcagtctggtctgcacacaccagaatcacctgggatacgtgttatatccttgcctgagatcacgacataagaatttctggactgggctcagacaccagtcttactgaaaagctcccttgtgtttctcctgtgtagtgggggttgagtccccctgtgctagagggacagggagtgcaatgctggaagaaccattcctgttatgtggagtgaattagaagacagcggtcaccaaagccgtatgttgcccagagtgtggtttctctgaggatggtttcaggacatcatgggagaggctggtggcctaccttgcctgggacgtcggaggtgcagctgctcctgcgagcatccccaagcttgcccctaccactcgagaactactctaaaccctgtccaattggtttatatttgaggcttgcaccgccgccctggtgggtcaacagtgtcacctctgatgagtaagtttggcgctcaggggagggtctgggctggaggtgtaagcctgggaaatcctgactgcctcaggctagaaatagaaagtaaattcctgacagtgtgtgggagatggcccaggggctcagaggagagtttctggtggggtttctggggatcaacaatatttatctgagtctgttaacatctcaggggctggattcctgtgttgccatttttgctaccttcaggccaggtgtgactgcaccctgggaaggctggagagagcatctcttgcttggttggggcagctgggaagggtgagcctctaaccattggcaaggaaaggttctgggagctgggggatgttgtctgtggtgactccacacttcttggagtcttgctcagcctcaggggctggtctgcacctgggcagctcacctgggctgaaggggtgcaggaaagagcgggggcgttggcgaggggagaaagaaggagagtcagcagcagaggcccctctgggggtggtgaggaggggaaagacttcagggacctgccagggaggaaggcaaaggtgggggaggagcggaagggctgcggatcaaggcagggacaggagggcctgcgtgtctctacccccacattccttctgggattttttttcgttcccttggttatagaagaatagcaattagcaaattcagtaaaaagggccagaaatggagattgtttgtgaattgggggccaagatgcatgagtgaaggaatgtgaccagaactatatataacccctcccttggcccacccacctgtccagcggagtgagcgatggtctgtttgttctgggctggtatgtagctcatttcactctaggagcccaccatctggacctgggcctcgctgccagtagctctcggtgaccatatatggcaaaatgatatatgtgataaaaagaagtcaaattccccaattgcgtcagcccctggagcatgcagcctgcctggctcgagccccttccagcctctctcccagccttctgccccgcaactttgctccggaaaccaaaggggctcagagattgactgggggagcagggagctgggggcggggctgccatcccttcacccgttcaccccaacgtttgtttggggtggggaggataattagcgagggcctgagctgccaatgtatttgcctctggccttaaaccaggaagattagaaactaagtgataactcacattctttccagaaagcagcctagtgtggcgccagtatgtatgtgggtaggaggtggggggcatagtcccactggggttctgtccacccccaatcccaaagatcacatggcccccaacatcccttaaattcccttgaaccttaacctgccaggaaaaatgttcagtccacatagcttatctgggggaacaaaatagaataaaatttacacacacacacacacacacacacacacacacaatttttctctccccaaactttctttcttcctttcttctgctctgccttgtccccagcatccacacctgatgcatggctgcgtgcaccaccctgcaagggagctcccactctgggccagacattgtgcaggaggccagaggaaggtgacagtatagagcagatcctggctctcacgcagcgtgtcctggatgaggcaatggactgctgccatacggggcatccagccagacacaagggctcaaggaagcttctgggaggaggcgacacttgagctgaatcttaaagaacaagcagtagttagcctaatgatggatggggattagaaccggaaaccccgggctgaggagagaaagcgggggagagagaccagatggggctgagtgcctccaggtgtggagagacgtgaggctggaggtaaacaggggccagagcatggagcctttttctaggagatgttaaagggactgggtctctgtcaccatctcccactcccagctcccagccttctatctcacagctcagtccaccaccgcggagcatgggtcaggtcaggcacgtgtgcacgcgcgcgcgcgcgcacacacacacacgaatatgcccggaaatgtatactcaatgccacatcacataagcaaggacatttagcaaaagggaagaaaagaagaaaaatgatgttcaaatgagaaccagggagagacggcaggcctgggggagggcactcagccaggaaggggagaggaggagtggaagtgggaagtgcgtgggcgggagagccaggaggctgttgatggaaagggagctggagaatgctctgggctctccgcaaggggaagacacagacagcagcggagacagctggtcagcagaggtggtgggagtggggggcgaagcacagagtctagagcccagcctcccccatccaaggctcagctcggatgtgtgtcccctcacgcctcgcccgcgggaactgtggctcctcctttagctgaccacagtggtgggcattggctgcaggaggtccctgagaaagccctccagtgtggtccaggagggagatagggcctggggatctgtctgatgctccgctttagtgtggatacattgatcagatgtgttccctggcatcctggagggttcgaaagcctgttctgaagggtgagtgtccttcatggcacatgcctcagagacctgtgttccctgtgcattcagaggggaggatcatattttaggactcagccgaggctttgcttccacctccttggctcctcagggctaggccagggacgtgcctgtgtattcgtttggaaatcccaatgcaatgcagtgggacatgcttagggcaagtgaagggcaggtgcactgtcttttatgacccacccttggcagccgcacagtcacttccgttgtattctgttcagagctactgtgataccatcagggaggagactatgcaagggcaccagttccaggaggtgagggtctttaaggccatcttggagattggccactgcagtcactaaattttggggtaatttgtcatgcagccatagatgactaatacaggcagagatgtccttgatggggtgcttggcccagggtggcaggcaggtaaggtggggcaggacttgactctgggtctcttagataagattcttttcactacaagagatttaaacttctattttatttattttattatttatttatttatttatttatttatttatttattgagaagaagttttgctcttgttgcccaggctggagtgcagtggcgcgatcttggctcactgcaacctctgcctcctgggttcaagtgattctcctgcttcagcctcccgagtagctgggattacaggtgtctgccctcacgcccagctaatttttttatttttagtagagacagagtttcaccatgttggccaggctggtcttggactcctgacctctggtgatcgtcccaccttggtctcccaaagtgctgggattacaggtgtgagccaccatgcctggccaaaaaaattcattttaaactgaagtatagaaagaaatgtatgggcccacataacagaaaagaccagaatcagtgctggttttgagtagctgaaactaagatgttagagaaagtatgtgactcgtagtcaaatgggacacatggagcacataggagtgtttggaggagaggtcagcagcagctagagtgatgggcagtggagattcctttgtgtatgtgctcaatttctacaccaaaaaagaaaagaacagcaacagcaaacaaacagtggagatgcttctatgtgtgtgtgtggggggggtcaatttgttggtttctttcgctttctttgtataggattcagcacaggcacgtgcctatctcagcaccttcacagcagagagcgaatctctgcatccagttaccccagagacacatctggacacctccccgcaacaaagcccccaagaccttccagaagaggagctgtgtccaagagcccccttcctgttatgggaagtgcactatcttctgaccctcatatctgttgcctctatttgttgctctctcataaaccaatccaaatggagggcatctgtattgccaaagggattggtcactcagcttcgtcggatgcaagaaaagattctgagggtagggacgggcatcggtcttgctgactgccctctctgcagctgtcaggactgggcttagcatgtagtaggtggcccataaatatttgttgaatgaacacatatcgtcgggaaaaaggaggttgttgtaaggacacgcagaagaaccagaactggaactggaagtcagagcggaagtggccccagggaccagtgagtctcagcctgtctctcaggggctgtgtcttttctcactacgcacctgctaagatgtggcacttgccatggcctccccattccacctcatggcattcttcactgtcaactttcagcctccagcttccaggagccttatactatgggtgactcgcttctcttctatatttaaccgcttcctccaaaccagacccttcccatcaacatttaaacatttcaggtctctcccactgaaagaacaaaccaaccaaccctctccaacacaagaccttctccagttactgccttccttcccttcacgaccagcttctggaaaggtttttccacattccccattttcgtctcttcccctcactcagttcttgctcattccattctgggttcctctccatcactccattgacgtaagtcttgctgcggtgccagtgacatcctagttgttccagtcctcaccttgcatgacccacaatcacactagacacagatggtcaagtttctcattgaactcaccagatgtttcgcctctttctctctgttgccccgtttcagcctccttcgccagctcaggtccactgccaggctggtggggttcctcaagcgctggcccagggcccccttgctgtccacgctgtactttctcagtgggcagttgtctgtgttcctttctttctttctgagacagggtctcactctgtcactcaggctggagtgcagtggtgcaatctcagctcactgcagcctccgcctcccaggctcaagcgatcctcccacctcagtctcctgagtagctgggacaacaggtgcatgccaccacaccgggctactttttgtattttttgtagagacagggtttcaccatgtgcctgggctgtgtgttagttatttaggctcttctgttactatatatacatttgtgacccttgtgataacagctcttccttctcctctgcttccaagaacatgttaggacttcctcacctccttgggacatggttatgaagatgagagtaaatgacacgtcacttccggacagaatctttcagagtcaacttgcaattcacgatgtccctgtctctgccttaatcatagtggaagcacctgctgagatggaagtttcctcagcctggtctctgagggtctatgatgagcagtcttccctagtatccgctttggagaaatagatcttaactgaattaagatactgaggtttggcattatttatttatgtatctatttatttacttgtaacatctttgttagattttggtatctggttattgctagcctcctcaaacaaactgagaagagttctttcctgctctattttctgaaagaatttgcttaagatttgtgtaacttctttctcaaatgtttgatagaattcaccagggaaactatctgggctaggagcttccttcctctttctttcttctttgtctctctttctgtcttttctttcttttcaaaagctctacttatatagcattgacatttaaaaattgtacatatttaagctgtacaacttgatttaactctaaacaatagttttatttaaataatattttttattatactttaagttctgggatatatgtgcagaatgtgcaggtttgttacataggtatacataggtttgttacatatgtgccatggaggtttgctgcacccatcaacctgtcatctacattaggtatttctcctcatgctatcactcccctagccccccatcccccaacttgatgttttgatatagattgtgaaatgatcacaacacagccaattaaatatctacctcttctacatagttaccctttgtgtgtacgttgaaaagatttacgatctatcatcttctgaagttttctttgtgggaaatgttctgataatgaattcaatttctttaatagatggaactatttagattttggatttcattttgtaatcttatcaagccattttgcccgtctcagttgccaaatttattggcataaagttgttcataatattttcttattaccttttaatgcctgtgggctctgtggtgatattgatgcaggatttttttcggcccctttgccgaacttgtggcaggggcgccccatctatttggctcactgcgctcagccccttgagggagggagcatgtgagagagtgagtgcaggatctggctcgctgcaggatctggcttgccacaggagcaagctctgtttggggggcctgtggccagaccaggtgtgtcaccttgaggggaacagtgacacccaggtgaggttgcccatgaccccgaggccccaaagggggtgtgttatagtagtcttttagttccactgtccatggtctgatggacagtggtgtgttagcagcttagttggccccttgcctcgtcatgtggggtagctgccctccgctgctgagggcaaagggccattgtgacagccttttctgggtacctgcacttggtgggtcctgaggtcttatccagcatccaggaagaaactcttccatcacctgcatgacctcattctgcctggatgctggacaagagcttgggacccaatgagtgggtgaagacagagcattttattgagtgacggaaacagctctcagtggagaggggagctggagaggggatgggaagggaaggttgtcttccccaaagtcaggttgtctcttcctcgaagtcaggccatctccccttctactgactgagtctttataggcacaggatggggagtgtgtgctgattggtttgtgagtatgcaaagaaggttaaaattaagagatcactcaaaggtgggcatgacagtgtagaaaaccaattaggaaagggtaggtatatgtaaaataggtgaaaggtggggatcaatcagaggaaggcacaccaaacaggaggacaaattcttaatccagtccaaggatttaacttgtagtttggctttcaggctttaaactgtctttggtttggaggtggggcttcaccagggacctgctcctgtctgccgaggcatttgactgcctcctgttactatcaatatctcctttcattccctaaatttataatttgcatgctgtctctttaatcaacctagccagctaggagtttataaatttcgttgatattttcaatgaaccagcttttggctttgttaattttctcttcttatatgttttctgcttcacaaatattgactgtttttttattattttttcctttcttctacttaaagtttactttgctcttttttatcctagctttttgaagtggaaccttagatccttacttttacatctttcttctttcctaataaagctaaatattttcctttaagcactcctttagttgtaaatcacaaattttgatagattatacttttatttattgttcagtgcaaaataatttttaattactcattttctttgtgacttattcttctacccatgggttatctggaagtgtgtatttaatttccaaatatttgggttgtgccagatatcttactgtaattgacttctaatttcaataaattaagatttatcgaaggtttcaatagtttgaaatgtattgagactcgttttatggcccaactcgttttatggtctatcttggagaatgtacaatgtgtacttggagtgttctacaaatgtcagttaggtcaagtggttgacagcattgttcagatcttctttttctttcttgtgatttttctttcttaaccattatatatattagccaaccctgactaatacagtcctaaaatctgcatctctggccttgagtctctgagctctaggcccatatctgactgtatacaatacatctttacttgtatatttcaaagacacttcaaattaactattgaagagaatgaactcatgatctttccccagaaaactggtgcttttccaaggttcttcatctcagtggatggcacctctgctatccatccagtttccccaaccaggaacctaaagtcatccctcagacctttttctttttttgagacagagtctcactctgtcgcccaggctggagtgcagtggcacgatcttggctcactgcaacctccacctcccgggttcaagtgattctcctgcctcagcctcctgagtagctgagattacaggtgtgtgccactaagcccagctaatttttgtatttttagtagagatggggtttcaccatgttggccaggctggtctcaaagacctcaagtgatccacctacctcagcttcccaaagtgctgggattacaggtgtgagccactgcacccagcccctcaggcctttttctgtcttgctgtctccacatccaatctaactccaatcccagcttttcctcctcaatatagttcacatccatccacttacctccatctgtgctgccaccgcccttgtgcaagccatcattcctcccttagataacggcagtacctccttgctcttctctccacttcattctccacacaacagccagggtaaagctgcaaaagccccagtcttatcatttaccccttgcacacttgaccacttaaaatcattcacgagcatctcattgctctgcagataatgacccaaatctttcccatggcccacgagaccctgtgtgctctggccctgctccccgcccccatctccagtctcccctcactcactacacttctgccacattcacccccttctaccacagggtctttgcacatgctgttggtcccaaatgaaatgttcctcccccacctgcacccaattttgtccaactatcctcttccttggttgaggtccacttttttttttgagatggagttttgctcttgttgcctgggctggagtgcagtggcgtgacctcggctcactgccacccccacttcccaggttcaagtgattctcctgcctaagcctcccaagtagctgggattacaggcgtctgccaccatgcctggctactttttgtatttttagtagaaatggggttt[132 bp omitted]cacttcccagggagcacctcctctaacctctgtgtcagtttgggtcctttgagaagcagatatcaaagtgggattagatatgcaggagatttacctggggttaatgatgtaaaggatgaagagctgacctgctggtaatatcccttctgtgtttggtcattggcccagagctacctggggagggagaagtgttggtgtcacgctgggggagatttgaaggtgtagcagttggaagctgtcagccaaccacatgcctcacaaaaccgtctcttcaagggacacatgcatagcacccctccacagccacacaacagctccctaaaccagagcgtgctccttcgatacatatagtcataggacaatgttccctcttttcagagaactgacctgggttgcaattatacccctcgtgagcgttatttttatttgaggtctgtctctgcttgagaacagggacaatggactcactggccattgtgtctcttgcccatgacagtgtgttcaataaatgcttgcaagaaaaaaatgaaagaatgaatcagtgattcatgaccaagccagtctctctgcattctctagtcctaattcacaaaatagaacctgatggcccagctcaccttttcccccctccggccatgggacaccaaggggctgatgctgaccctgtccatcagttatgtgggggaggggagtcatgtggtacaaatctggggtgccacagtggatttctctagaatgagtaccttggaaccgccacgaagtctttgtgtattttttttttttttttttggtaaaagcatggcactcttcacctgacttaatcttccagagactggagttgtgagtagtagtgcagacacctgtgagtcctcatccccccagcatgaattgtccccagggaacaggtccttatgcctgaggctttaaatacacaaacacagcagcaccccctctgcttccccagaaacctaccctctgtttcattttctctgagatgttttagctgagactaaggcagcatctcaggactggaaacttcctggagcttactcacatagaatgaaaatacagcagcgttagaaacagggccatagactcagactagacctgagttcaaatcccagccccttcacttccaagctctaggactctgggctgttacttaatctctctgagcccccttttctcatctctaaaacggaattagcaaaatagcaaaaccaaacaggcagttaagaagatgaagcaaaatgtctctagtagcggctcaaagttcagggcacattagcctattagcagctctgaaaaatcctgcagtaaagaaacccagctttccccaagcctatttggcagcaggtttgtgaagcacaaccacgcacgagattctggtgttctttggaaagcactgctctagagaatgtagcttttctctttagatcactgtggaccttcaaaactaccacaaataagatccagatggctttggcctcctgaaaaaccattctgaattgagttcgagggtgttatatctctggatttcattgaggaatgctggaactctccaacatgttcatcactgtgtgctctgcagggacgttgtggatgacatcgtgtgatgctcctctctttaatgctaacggacactttctccagtcaaagctggtcatggtcatagcggcatggaatgttttaagtgcacagaaggttagaggccagcttgttttacctcttcattttgcagatgagcaaacaggtccagttagaaaatcaagtgactcatccagggacagacagaacgaggggcagagctcagaactcagacccagccagctgttgtgcactgaatggacaccgctgggctctcaggaagatgacagctccttggttagatgcagaaacatgaaggaccacccgttggggactggtaggccccttggcccttggctccttcttccgacatggctatgaggagggaggtgaggggaagggcaggattatggtggaagaccaggggtctgtgggtctgagtccagatggcaggcagctgggccgaggcacacaccaacgactacttcctcttctttctggtgattccaagggtgagaaggctgagaaggaacttgcaacagatggaagggagaccagaaggaatttggaatgggcccaaggggtccagctcttagaaaatgagggtgaaatattttctgcttggagagaacattatttacaagaacagagcaggaacagggtcctgcccgggtagactggtgggctctggcttatgtttcgtggctgtgacagctcataccaatctgtgtttctaagacaaccagcgaaccaaataggaacaacattaatggtgataagaggtggctgttgcaggctgggccaacccagacaagttgagctcaaagatcagaagttttgaggccaattctaaatttagagtccaatttttgaggaagccaaaatgagctctccttgcatgaagtgtgtcagaagaatagaagacaccatccccaaagagcagctagtagagggggctggggtcctccttccagctagagatgctaataatgagatcgaacagctccttcttcttctttaaaaaattcttagggccaggcacggtggctcatgcctgtaatcccagcactttgggaggctgaggcgggcggatcacgaggtcaggagatggagaccatcctggctaacatggtgaaaccccatctctactaaaaatacaaaaaattagccaggcgtggtggcgggcgcctgtagtcccagctactcgggaggctgaggcaagagaatggcgtgaacctgggaggcggagcttgcagtgagccgagatcgcgccactgcactccagcctgggggacacagtgagactctgtctcaaaaaacaaaacaaaaaaacttaagtcttttcaaactaaaagctttgaaagaactgaatatcacatctcttctctcttccctgctgcctttaaaatgtgttcttatttagaaagaaccccaaagcaactcagggtgtatgtggaaggagcaaaatttaaacccctagcttcccctccacacccagcctcaatctaaccctgcatggactaggcctcactcccttctaagtgggcacttcagagcaggaaggctgcaggttatctaccagagcagacacttcctgttagctcaagccaaatactctcctccttggccaactcgtgggattggcagcaacactatgctgatgccagtgtgccccagagattagccacttttgtccccaagttttatggtactctactatgaacactctcattgtgcttgaatggactaggggctcaaaggctctattcccatgtgggctctagcctccacttatttttaccaactgagctcttaccatctgcctttgccatttgctctaagaggtcttggaaggtaaacctctcagagtaacaatttcttcatctataaaataccatgtgtgggccgggcacgatggctcacacctgtaatcccagcactttgagaggctaaggtgggcggatcatgaggtcaggagatcaagaccatcctggctaacacggtgaaaccccatctctgctaaaaatacaaaaaaaaaaaaaaaaaaaaaaaaaaaatcagctgggcgtggtggcgggcgcctgtagtcccagctacttgggaggctgaggcaggagaatggtgtgaacacgggaggcggagcttgcagtgagtagagatcgtgccactgtactccaggctgggtgatagagctaggctctgtctcaaaacaaacaaaaaaaaaccacgtgtgtcaaattcacccatgtgatgtttcccgcatttatatccagcccctatttccacaaatgctacctaggtcaggtcttcattgtgcctatggaggtctcctcatttattgggctgcctccattcgtccacaatacatagggctaatcttcctaaagcatgattttgatcaagtcactctcctgctcgaagccttttcatagcttcccattgcctgcagagccaattccaaatcacttagcctggtttcaaagtcatccaccatctggcctcagcctatcctttttgttcattcttgtccacctacttcttccagctgttacataaactgtcgcctaaagctgccttcttacatattttaagtgcggcctaaaggtttctccatacatagtgaattgtaacctaactggatgtgtaaataagtctgtaatctactcttctaccagtcacagaattccaaccaatcacaggcggcccactgttcaagccataaagatggcagacactgagctgtaaccaaccctgctgtttctatacctcactttccttttctgtttgtcactttccttcttctgtccataaatgttatccaaccatatggcagtctcgggaatcgctctgaacccattctggttcgggggctgcccaattctcaaacgttttttcttcagttaaactctgttaaattcaatttgtctaaagtttttcttctcacacagcaaactgaacaatcacactccaggttttcacgtcaatgggccctcattcacatgcatcctttaatctgaaatgtccttctccacatttctgcacatctaacttttaccctactgatccccatagcctaattattagctgtatgatcttgagcaaattatttaaactccatatctgaagaagatcgtttccaaagattgccacagcaatcgtttccatcctgtgtgccctttgcaaggtgagtttgccacttctccatgtcagtttcctttccgtttgaatctttgctggctctgtgacattcatgaacccatcaaatgtggtggacatgatgctatgtcatttgcagcttctgtttttgtactctgggaagctggccaccatatacagaagttctagctatcctgctagagagagaggtcacagaaaggacaactgacatgccccagctgacagctagccccacagcccgagtcaactgagtaaggccattttgatcctccagctccaaccagggctaacaccgcagcgtagagatgaactgtttccactaagcccttgcttgagtttctgaacccccaaattgcgaacaaataaaattgctgttttaagccactcagttttggggtagattgttatgtagcaatggataattgaaacagactcctcgcctacaaaatggggataataatggtctccagcctcacagaaggactgcgaggattaagtgagtcaatctatgaaaagctcttagaatagtgtctgcacatggcaagatcgcaataaacactaactcctcacgacctcaaattaacttaatgttttcttgtttcttgttcatccctaagtccctctcgcagcagtgcctggcatacaataggtactcggcaaacacaattggatatcaaacgtccccttccttaagccttctctgatgacattccatcagcttgccaccacccctccctctcctgattcccactgcactttatcaactcttcccacaatgtaggctaccttcagcctggaaccctggctggtatgtctccttggtagatggtgagcttcttgaagacaatgacattattcataatatataaacaataatgaatgaattaattaaaaatgggaacaaggccaggcacggtggcttatgcctgtaatcccagcactttggaaggccgagctcagcggatcatgaggtcaagagatcgagaccatcctggccaacatggtgaaactctgtctttactaaaaatataaaaattagccaggcatggtggcgcacacctgtaatcccagctactcgggaggctgaggcaggagaatctcttgaacctgggaggcggaggttgcagtgagctgagatcgtgtcactgcactctagcctggagacagagccagactccgtcaaaaaacaaaaaacaatgtcacctcccataccagcataaccaggttggttgtttgttttttgagacggagtctggctctgtcacccaggtgatcttggctcactacaacctctgcctcctgggttcaagtgattctcctgcctc[132 bp omitted]cttggcctcccaaagtactgggattacaggtgtgtgccactgtgcgcgaccgcaggtttgtaattcaaaagaggtgatgaatgactcaggcgctccgacatgccttccagagcatatctaattttagatggtggcttctctgtcttcctggtcccatctgtgtgacttttatactttaaggcaggagagaatccaaacaggactcctgcagaaagtctatttactgtcctaagagttggttgaccttgaactctggaagtacagggtgtcacaaacctaggaaggaactaatgactcccaagtctgttcctatggctgacaaatgtctgaagttcctccagtagatgaaaaacagctcattcctaagccatgatttcttcagaaatcattttattatctctaagacttgtgaagtctaaagagagtagaatttgaaagaatgttgaattccatctggttcaaagagctttagtgttagacataaacaactttaccagtttgaaaaaccaaagatgagcaaaatcaaatcaggtggtagagcttcctgggtaggggtgtaacatacaacttaaatctaggtgtcctggtctatgtggcactttgtttgaattatggggtcattgacacagcaagatagataaggcagagtagttgttatgtaatctcaggagagtggagaaggcactcccaaaactggaaatgatgttacattttccttggtgagaatcttttaaccccaggagggtttaaaattaagtatagaaagtttaagggaatcatgatattaatgttttcatgtaaaagaatctaggcatgtttatgtatatataatgcttactagaatttagcctatttacagaaaaaaatgtcaaaattccagttgaaaattagtaagtatttaattgattcagacttatgactttaaactgaaaacttcctaagcgtatatatagtattggaacatttaagagaaccctaaggttgtcatatttgcaagtttaatttatcgcatgaataatctaaacttaaacacttgaaaaggttttgttgttaagtcaggccattaaagtacataaaaggaaacagaacacagtaagtgtctcaatgcaattttaaatctttaaaaggaatttaaccttataattggaaccacacatccaaaatccttttaaaagtgataggtaaaatatgttggacatcaacgggataagattagaaagctgaagcttaaagagctatgattttgaattgtaatttcaataaatattaattttaaaagtcagctaaacttctgtatcatctatgaaatgagatttatggtaataattgccgtgtaagatcattaagaagattaaatgagacattagtttaaaagcgtctggcactgtgcctgtcacatggtaagcatgatatatgatggcatttattaatattattaagtcttccttaagggagagcataaagccaggcatggggatgtacacctgtactcccagctactaggaagcctgaggcaggaggatgacttgagcccaggagttcgagtccaggctaggcaacatagtgagactctgtctcaattgaaatcaatcaatcaataataataaaagagtacaaagatgtttagaaatgagaggaaatatgggataagatgtgacccatagcacaagtaatcctggtggcaggggtgagatatccaccacacccctttgccccttagcccctgtctggctaacaaggctcgccttatcttgtctgggtctccccaagaagtgttcagcttctccagcaggggtagtgtgcaattcattaccattgcgtcacccagtagccctttgctaagatccataggaggcgtttttcctaaatccctcattctctcactccatctatcctacgaacaattgatgtttgtaccaagcaccattctaggcagtggggatagtgcagccagcaacagcagcaacaacaaaaaaaccctgctctcatggagcttacggtgtgtgtgtgtgtgtgtgtgtgtgtgtgtgtgtgtgtgtgtgtggtttttgagacggagtctcactctcacccaggctggaatgcagtggcctgatcttggctcactgcaagctccgcctcccaggttcacgccattctcctgcctcagcctccagagtagctgggactacaggcacccgcaaccacgcccggctacttttttgtgtttttagtagagacgcggtttcaccgttagccaagatggtctccatctcctgacctcgtgatccatctgcctcggcctcccaaagtgctgagattacaggcatgagccaccgcgcccagccatggagcttacattctaacaatggagacagatattaaacaaaatcgacaagtaagttatgcagtatgttagaagaggatatgttgatagagaaaatgcacagggcaaaaagatgggtgtggtggggtaaggattggaattttagaaagggtagccactccacggagaagctgacatctcagccatttgagccaagactttaaagaggtgagagagccttctgtgcacagggaacagaaagtgcaaggactgtgagctgggagtgttcctcacacatcggaggaatgtggaggacgcccatgaggctggagagaacaagcgggagggtaggagatgcgatcagacaagccatcgtggaaggtcttgtggcctttgttaggactttggctcttactctgaatgaagtggggagccattagggcacttttgggacaattggggaaattccaacaggaaccgtatattaaatattatttaatcagtatcgaagtttgtggatgttgtaattctcaataagttgaaataattttcctgggtgttggtgtgaactgaaagtttgtgtcttcccacctcccaaatttatgtgttgaaggcctaaccctccaatatgatggtatttggaggtgggccccttgggaagtaatttgggttagattaggtcatgacagtggggccctcaggacaggattagtgcccttaggaaaaagtgaagagacattaaatcttcctctccccaagcatactacaagatgacagccacctacaagccaggaagaggcctcagaattaaacccactttaccagcaccttaatcttggacatcccaacctcccagctgactatgacaggtgtcactgttaaaagaaacatgctgacgtacttagaggtgaaggatcatgatatctagaacttattttcaagtgactgggaaaaaaataaaggaaaaaaatttaaccatttgtcattgttacaggtaagactgtgtgctccccaaaacttgtatgttgaagccctaacttcatgtgactgtatttggagacagaacctttaaggaggttggggttaactgaggtcataaagatggggccctaatccagtgactggtgcccttataagaagagggagagacaccaggtgtgtgtgcagagaaagggccatgtgaggatacagtgagaaggcagccatctgcaaagccaaggagacaggcttcaggagaaaccaaacctgcccacaccttgactctggatttccagcctccagaactgtcagaaaataagcttctggttttaaagccacccagtctgtgtgctattttgtaatggcagccctagaagactaatctactgcataacaagttacctcaaatgtaggagcttaaaataagattatctcacatgatttctttttcttttttgagatgcagtctccctctgttgcctaggctggagtgcagcggcatggtcttagttcactgcaacctccgcctcccaggttcaagcgattctcctgcctcagcctcctgggtagctgggattacaggcgtgtgccaccacacctggctaatttttgtatttttagtagagatggggtttcaccacgttggccaggctggtctttaactcctgacctcaggtgatccgcccacctcggctcccagagtggtgggattataggtgtgagccaccacctccagccaatcttacatggtttctgagggtcagaaatctggaagacgctcagctgcgtggttctggctccaggtccatcataaagtacagtcagtatgttttccccagggcttccatcatctgatgg[135 bp omitted]ccacatggttaaaaccccatctatactaaacatacaaaatattagcccggcatggtagtgggcacctgtagccccaactaatcaggaggctgaggcaggagaatggcatgaacccaggaagtggagcttgcagtgagccaagattgcgccactgcactccagcctgggcaacagggccaagactccgtctcgttaaaacaaaacaaaacaaaacaaaacaaaacaaaacaaaacaaaacaaaacaaaacaaaaaaaacccactcacctggctgttgacaagacgtctcagttcttcaccatgtggtcttctccccaaggccgcttaagtgcccttatatgagggcatggcagttggctttccagattaaaagaacccaggaacagagcaaggaggaagacacaaggccttttacgacctagtcttggaagttgcacaccttcgcttctgacacgttctagtatcagtgaatcactaaggccaccccacactcaggaggaagggaggtaagctgtgtcccaaattggtgagttcttggtctgacttcaagaatgaagccacagaccctcggggtgagtgttacacttcttaaaggcaacgtatccggagtttgttccttctcatgttcagatgtgttcagagtttttcccttctggtgggttcgtggtctcactggttcaggagtgaggctgcacaccctcgcggtgtattgcagctcttaaggaggcgcgtctggagttgttcattgctcctggtgagtgaagctgcagaccttcacgtattacagctcattaagactgtgtagacccaaacagcgagcagctgcaagacttacctgcaaacagcaaaaaaaaaaaaaacaaaaaaacaaaaaaacaaaaaacgaggctaccaccacaggcaaaaggacctcagcggtactgctgcagcaagttctggcagcctgcttttattctcttatctggccccacccacatcctgctgattggtccgttttacagagagttgattggtctgtcttacagagagctgattggtccgttttgacagggtgctgattggtccgtttcgacagggtgctaattggtgtatttacaatccctgagctagacacaaaagttctccacggccccactagattagctagatacagactgctgattggtgtatttacaaatcctgagctagacacagagtgctgatcggtgcatttacaaaccttgagctagatacagagtgccgattggtgtattcacaatcccttaactagacataaagattctccaagtcctcaccagatgagctagatacagagtgccgattggtgcatccacaaaccctgagctagacacagggtgctgattggtgtgtttacaaaccttgagctagatacggagtgctgattggtgtatttacaatcccttagctagacataaaggttctccaagtcccccctagactcaggagcccagctggcttcacccagtggatcccgcactggggccacaggtggagctgcctgccagtctggcgctgtgtgcccacactcctcagtccttgggcagtggatgggaccgggtgccatggagcagggggcggctcttgtcggggaggttcaggccgcacaggcgcccacggtggcggcggggaggctcaggcatggtgggctgcaggtgccgagccctgccccgctgggaggcagctaaggcccgtgagaaatcgagcacagcgcggtgggccggcactgctgggggacccggcgcaccctccgcagctgcttgcccgggtgctaagctcctcactgcccgggcccggtggggccggccggcccctcggggtgcggggcccgccaagcccacgcccacccagaactctagttggcaggtgcgcagccccagttcccgcccacgcctctccctccacacctccccgcaagctgagggagccgtctccggccttggccagcccagaaaggggctcccacagtgcagcggtgggctgaagggctcctcaagcacggccacagtgggctccaaggccgaggaggcgcccagagtgagccagggctgcgagggctgccagcatgctgtcacctctcagctgcatctcttgaagagcaaaaaaactcttggtacgtgctatacaggatttgttattgtaattattattattatcaatgtatttaaatccacagatacctcccctggaggatcttcttctaacccgcctacaaccctctctctgattaggggcctgagcaaagcctgagaagggacgcgcaggacaaatttgcggggaaagagagaagattgggcaaaaatttggcatgagaacagcctttaacctgtcccttcaatacatttgctgcctcagaaaggaagaggccacaaggagctcctggtttctactacagcctccagagtctctaattccgtccccaaggatggtgtgggcagcatggttggggggcatccacggtcttcagcggtcccactctggagcctcccacaccacactgtgggcactgtggacattcagtaagtatgtgatgctgatgatcttgaaggttctcagaggctggctgattcttcctgtctgtgtattcacacttggtacttgttgattagttaaggatcaaggatcccaattttttttttttttttttggagatagggtctcactctgttgcccaggctggagtgcagtgacgtgatcttggctcactgtaacctccgcttcctgggttccagtgattctcctgcctcagcctccctaatagctgagattacaggcgtgaggcaccacatctggctaatttttgtgtttttagtagagatggggtttcaccattttggccaggctggtcttgaactcctgacctcaggtgatccacctacctcggcctcccaaaatgctgggattacagctgtgagccactgtgtccggccaaggatcccaattttgaggagagactggtatcatgagttcaaccaaccagcaggcttccggtgagcacagtgagccagaatgatggcttgtggcttcattcaaccagtagaatcacagcaataaaaatacctaatacatctcctattccaggttctgttctaaatgatatacacacatattaattgagttagttctcaaagcaaccctatgaactatgaatctgtccattttacagatgaggaaatagaggcacagagagattaagagactcgcccaaggtcagagttcagagtttgattccaagagtatgtgtttaaaactgctatgctagattgcctcttaaaaattgtgcaattcatccttaacatttaaaggtatctaaatatgagcaggaggtggtacttaaacaatagaaataattgagagtaagatttagggactagaaagttcaggtaacatagaatgctaagcaggaaggaacctgagacataccagggccataaattttcaaactggattctgaagagtcctaggattcttgtggtatctctggatctgcttgtccaggagtgagggaaatctttggactccaccaccccaattcaaccacagcacccaccaggatctgtttcacagggtgttcctgtgcagaagtcacaagcccaagtttggctggaccacagcctcagattgtcagggaagtttgcaaatggctttgaagtggctgaaaatattactgggtttcctttccatgatattgtctctagaaaacctttccggggttgattctatagggatttgtgtctttctttttgtttttctttttaccattttgcaactctgaactctgttgacacaagagttaacttacgtagcaagtgatttctgccctgtagaagacaacatttttgtatctattagcaaattagtttctacattcctgattgtgcatatgtgtgtctgttctgtggattcttctttgaatgcagttttatgtcatactggttatctcaactgatgagttagataaaatcttttttttcctttttttttttcttttgagacagagtctttctttgtcatctaggctagagtgcagtggcgtgatctcggctcactgcaacctctgcctcctaggttcaagcgattctcctgcctcagcctccgcagtagccgggaattacaggcgtgtgtccccacgcccagctaatttttttatatttttagtagagatgggatttcaccacattgaccagcctggtcttgaactcctgacttcaggtgattggcctgccttggcctcccaaaatgttgggattacaggcatgagccaccacgcccggcgagttagataaaatctttgtgacatctccatttatgtttatatgtatatggcagtcataactttaagaaaattatcctttaacaagatggtcttcctgcattgattctggcctcctcctattcttgccccctatccagtccattctccgtgaaggagctagagccatctttgccaagagcaaacctgatcataatcctccccggcttaaaaccgatatgcagtatagcctgctgatagcagtgcagacctcgcttctgctaggacaactggatgccatcatcctgaatcggacacctcacctgacatcaaacagcgggacagggcccaaggcccttgggtgcccacaacacactgattgatcagcccagatctcaccaccatcgctcacttgcctttctaatttgggacagagaaagtttgtgagttttattttgtcttttttttttctccagatttaaagatctattccctttcctctcccccaaacctcattccccagaacctagattctgtgccaaattgggtttccaagcctagcagtataaaacaaaaaaacaaacaaactcctacccagagctcaatctttggtctcttattctttcttttttttttttcctttagtaaaatctcagtgctgccaggagcagtggcttctgcctataatcctagcattttgggaggctgaggtgggtcttggtgcaaggtgaaatcacttgaggccaggagttcgagatcaccctggccaacgtggtgaaactgtctgtactttaaaaatacagaaaattagctgggtgtggtgcatgtgcctgtaatctcagctagtaaggaggctgaggtgggaggatcacctgagcttgggaagttgaggctgcactgagctgtgatcccgccactgcactccagcctgggtgacaagagtgagtgagactctgtcaaaaaaaaaaaaaaaaagaaaagaaaaaaaccctcagtgctctccagtccccttagaataaaagccaaaatcctggaaaaggcctccctgaaaggtctcacatgatctagcccctgcttgcctctgttctcaccctcgccctcttcattccagctaccctgacctttggcccaccctttccagacccagcctcttcccattttgtgttaggacactgtgacaccctctctttctcctcctccttgccattgtctggcggaaacaaaacaaaacaaaaataacatgtattcattttcaagtctcttgctaaaccttaccttgctgcctcaaaaagacctggttggttccccacctccttccctcataggatcccctagcaccagaacttcctaacagccagtgcagtgatgattatttaatgatttagctatttatatataggggtggaatgtctctctttcccaagaggccaaaagctccaagaggcaggactcagatcagttgtttactactttgt[131 bp omitted]agctccgcctaccaggttcacgccattctcctgcctcaccctccggagaagctgggactacaggcgcccgccaccacgcccgg[179 bp omitted]taatccctgaaatagaaatgatcctgatgtatctcaaaatccaaacagtctggcagttcctcaaaaggttaaacatagaataaccataggaccaatcgattccactcctaggtgtttacacaagagaaatgaaaacctatgttcacacaaaaacttgtataagaatgttcgtagcagctttattcaccaaaagcagaaagcagaaactacacaaatgtccatccactgattattggatcaacaaaatatgctaccatatatccatacaatggaatagtattcagccctaaaaagaagtgatatactgatacatgttgtatcacgcatgaacctcgaaaacattatgctaagtgaaaacatgctaagctaaacataaaagatcatagattgtatgaccccgttcatgtgaaatatctagaacaggcaaaggcatagaaatagaaggtagatgaatggggctggggggttgggaggaaatgagattaactattgggtctactaacggagctttttagggggtgaagaaaatgttctaaaaatgtgttgagagttgaacaattctgtaaatatgctaaaaaccgtggactgtacactttgaatgaattatacaatatgcaaattatatatcaataaagctgttaattattattgttattgtttttttgagacagagtttcgcactgttgcccaggctggagtgcagtgacatgatctcggctcactgcaacctccacctcccaggttcaagcgattctcctgcctcagcctcccgagtagctggggctacaggcacccgccaccacacccggctaattttttgtatttttagtagagacagg[136 bp omitted]aaccttattgggttaagatttctgggagaattggaaagctgtagagtttctcttgatccacctccatcctcacccgcctcagccatgaaaaatcacatatgcttatatataaaagtttcataaaaaattaggtgattcccagtctgaagcccatttattgactccctagacatctataatccccatagaaacctgtgttgataaaaactatcactagtaactgttagctcaggtgcacatctgaaagaattttttttttttttttgagacagggtcttgccctgttacccaggttggagtgcagtggcgtgatcacagctcactacagcctcaacctcccaggatcaagcgatccttttgagtgggtgggactacaggcaagagccacagtgccctgctaatttttaaatagtttttgtaaagacagggtcttgctatgttgcccaggctagtcttgaactcctgggttcaagccatccacccaccttggcctctagaactgctgggattaccggcaggagccaccatgcccagcctaaaatatttttttttcccatccttgtcatagtcactcttcgccccctcctcttctttcttcagaagctgttttgacatcctttctccatcagtgtggtaggaagagttttaagacagttcccatgaccttcgccttccggtattggggcaaaaggaggagattatctgggtgagtctaatttaattgcaggagccctctgaaagcagataatttctctagctggtattggaagagagtcagattcaaagcctgacagggactccacatgctgttgctggctttgaagatggaagaggctgtgcaatgaggaatgcagttggcctctaagagcagaggggcccctagctgacagccaacaaggaaatgaggaccttagccctagagcttcaggaattggattatgtcagcaacctgaaggagcttggaagtggattcctcccctgagcctccaggtgacggcccagccattgcacaacatggttgcagcctcatgacacgctgagcagagccaagccagcccatgcggactctgagctgctaccgtgaggtaacatgtgagtgttggttcaggacccccagtttgcagtaatttgttatgcagactagaaaactaacacaatcagcctcgcgtcgctgtgcagctggctgtctttctgttggatgtttctagagccacctcttttcctcataagattcctaaaatggttatttgtccccccctctaccccgagggtgacatcatactccggttgcctccgagcctggctcatcattccgcactccatggcctacactgggagcctcttcctggtgtttcaaaggtgaaagctaaggggaacctcaggccattgcaggtgaggaagctgcactgggctggtgtcacagctctcagcagctctgatctcccaagagaagaagtttggcctgagacaggggtctcgtgggactccgcttggcctcagcaccctgctatgcacatggaaggcttccagtaaacattgctgggaccgaaagtccaggagcataggagctcactcagatgcccaagtgatcaaccctaagatggcttgaaaggagaagcacaaggttctagagcccttccagctgaccgaaagccttgtccgtaatatgtgggaccctggtctggaagctagggaaagggctttgagggtaaaaccttgcgaggaggggggctgatcccaagggctagtagctgatctcacagaagcagaggctcttcagctactccagggagaccgagatcacctggaagggtgctcaaagcttggttttaatcccatctttagcagcagtttggaggttgtgtatatggcaaggcgttgtgacagacatgcagctgtctgcccacctgcctgcttgcaggctcagctcttagtcccccaaacccctccaaccccctcttctgtccttcccctactcatcattccgcactccatggcctacactgggagcctcttcctggtgtttcaaaggtgaaagctaaggggaacctcaggccattgctcacgggtttggaggggaaccgagtgctctacactgagagtgagctcctgaagggcttccttcctcttccctccctttatccataaaacacccagagccctacttcctgcctttgctgatgagaaccattcatttctggaacaaatcagttatttctgctctcgtgagttagtgtcttttcttgctgggaaaaactccagttaggcccttaccttcatcttcttgttcttggagcgtgatctcatgcatctgagagttggaatccctcttgaccgggttgtcttggcttctttatgtggctatagggccccgggtagccatgcagaaggcctgagatggggctggggtggggtagggaaggagcgagggcctgtctgtgactgccattaccctcccgatggggagaccccgtcactccggcgcctgggaatccctgcaccatttggatttgttctccctgtgtctgtgggcttgagtaggtttgcggatttgtggcttctcttgtactcaagaaatctgcctagacccacagaatttcttctgccccagggctggaccaccctttttaagcatgaaatatgcaacaatatcagagtgagttatacacatacataatatgcacatactagttatacatctgcagtatcggggtgagtgtatgcacacttaacagcatgcacatgcagagttacacacaggcaatatcagcgtaagttatacacacgtgtaaacacgtgtgtctcaggataagcttatgtgtgatcacaggagttctgagtgtgaccctgaggagtccctgtttcagtcaagccctggaaacttggtggcgcagggtggtgaagccgaggagggagtgcagaggaaggaggcagagggagtgccttcagcttctcgcacagggccttgggtggtgctgtaggggtggtgctgagggggccttgcacactccaagaggaagtgtgttcaggccgaacagcctgggcttctcaaacaccaccttacagcgacagcagaagacggggctgtggggggaagtgtgtatattggggagttgggggaactgcctgttctgcgccttctcccacctcccaggacccagaccaggaggctgaacgtggagaagttatttcagcagcatatccttcacccacggccgtttctggagatccccaacccctccatgcccctctgagcacccccttagcactcgctgtcctgggtgtgtgaggtgacctctgccctccatccactagagacgcctgtttggccagggccagccggcaggactgcagcctccagcatccgttcctcgcttctgaaggcagatttgccttggtttcgtcacctgtgaaatggagatgatgatagcgtggaggcttcgggataagtcagcatgcctaggcagaattgtattctcagaattccttttcttgggtgtgtcctgttagtgtgggtcacagaaagcttcccgtaggggatttgggggcggactcactctgatattgttgcatttttcaggcttaaagaggggcccagccctggggcagaagaaattctgtgggtctaggcagatttcttgagtacaagagaagccacaaatccacaaacttactcaatgcctgctgactggcggcattggtgtgaggcggtggccaggcctgcatctgcccgccctcccctggaacctccttcagtctcctgcccctgggccaggcgtatgtgttcatttccaggacgaaggatcctggctttggcaggacgcccacaccaccaatttcagaagcaacaagaactgacgtgggtttctgtctgcctgtctgtcctcgggtctccagcctgtgctatggattctgacttgtccttgatctgccccactttacctccatgcttccttcccaaccatctcccctgcgaacttcaagcctcagcatcagatgggaagacagctgctttatagacactgcttacccagtgcccacaactgcctacagtcaaatccctgaaacaaagcccttcacatataccagaagaatctctctctaccatctatctatctatctatgtatttatctacctgtgtatctatctatgtatctatgtatctattatctatctatctatctctactatctattgtctatctcctatctatctaccatgtatcttctatttactatttatcatctatctgttgatctattgatctgtatctatcatctatctactatgtattgtctatctccgatctatctacatattatctatcttctatttgctatttatctatcatctaatttatcatctatcttctatatctatgtatctatcatctatctgctattatctcctatcttatctacctaccatctatcttctatttactatttatctatcccatccatccatctatccacccatccacccatccacccatccacccacccacccatccatccatccatctctatctatctatctatctatctatcaatctacttacttctcttgctaaacgctgacccaggtagacacgtattgcttcttgaggtaggaaatgagtggagcccaggtgcttgaaagtgtttggtcactgcagggcagtggttcttcaacttgagcacgcatcagaatcatgtggagggcttcttaaaacccagagtgctgggtcccacccctggagtttctgattctcaggtctggagtggggcctgagaatttaactggtaaagttgccaggtgatgctgacgctgctggtccggggaccacgcctgagaatgactgctgtaaggtgttgtatgtgaaggtgaggggttactgcggccacgcagcgatcctggcagggcagctgcagcagtgccttccctgagacaacaggaatccgggcagtctgagggccctctaggatcacagggccagggaggagacacggagccttgttaagtctgctcctcagcctgctttggggacaaaagcacagggcctctgctttctgggaggcagactgacgagggggagagaccaggctcaggaagagcagacccaggggtgaatcctgaccctgtcgtcctgtagccagggttcccaggcaagcatcctgctctgtgagtcaggataatgatgcctcactgggttttcaaaaggcggatacaaatgaagtccctgttgaatacatgttacttccccacggctctctgacttggcttttgctattgatttaaaaatgtgcaattgagtttttgaacctaagtttgagattttacattgacctcaattgagttgagtttggctggttttaatccatcatcccagcctgctgaggtgctcctgagccttgagcttgtcatttggcacattagtgatccctccctagttactggtggcctgcccagtaactagggcagtaactagggctgttccttccttagcgttgctgacactggcttgcatgttttagcgcacacagtggggcaggggagcagagcttgctcctgaagtcagggaagagtgctcgactcagcacttttgcagctctgacctgggaagctgccttcgtagttttaagtgggtctttgcacccaaattagaaacacctcatgcttctaatccaagcactttgggaggccaaggtgggtggatcacctgaggttaggagttcgagaccaggctgaccaacatggtgaaaccttgtctctactaaaaatacaaaattagcccggcatggtggcgggcgcctgtaatcccagttactcgggaggctgaggcaggagaatcgcttaaacccaggaggcaggggttgcagtgagtcgagatcgcgccttgcacttcagcctgggcaactccatctcaaaaataaaataaaataaaataaataaaaataaaataaaataaaatataaaatataaaattataaaatataaaataaaatataaaatataaaatataaaaaaataaaataaaataaaataatataatataaaatataaaataaaatataaaagtttgaagtggtggatgagagaagagtcctctgtactgaccctactggtttgttgcccacctgaacactgactgtgtgtgagcccaaaggtgaggggacaccagacctaagatgtggtttctagttcccaggcagcctaggtgaccagctttgagagtgagtgcttgttgggggggtcccccgtcactgcactcttccccatgaataaactaccaaagggctagagagaacttgagaacaaacttcatataacattcactgttttcagggatagagtgaggcccacgggggaaaataagcaggtgtccctcagcaggaaggcacagcaggcatcggtcccgagctggactgactggaccgcaggctcacgacttcttctttcacgatctctgtctcaggacattctggaacaaggctgcctccttaaatccggactcgctgttgttccttctttttcacctctgcccagatgtccgaccggtcttggataaattgctggatctagaaaggcaaggagcccagcgttaactccgccccccagaggcctcccctgtcccaagatggagcatcccagacattcacttgtaaagaattcatcattgctttcctgtgactgacttctttttaaatttttatttatttatttttttgatacaagagtcttgctctgtcacccagggtggagtgcagtggcacgatctaggctcactgcaacctccgcttcctgggtttaagcaattctcgtgtctcagcctcctgagtggctgggattacaggtacttgtgaccatgcccagctaatttttgtgtttttagtagagatggggtttcaccatgttggccaggctggtcttgaactactgacctcaagtgatccacccgcctcagcctcccaaaaggctgggattacaggcatgagacactgcacccaaccatgactgacttcttgaggaggccactttctctcatttgacaatgttttgaggtgaaattgagtgttgggtgtagccgatgagaagcaacaaaacagggatggagttgggaactcctgaaggcagaccctggtgatgtatgaagtccaggctgagagtcaagcaggagggataagaaagaaagggtcacaagcaggctggtggatgaaaaggatttagcaggcagggttccgtcagcatgggcagaccgccttccacaacttcaccgccctcaaggtggtcgtgcattcgaaacccagagctgatgctcatcatgataaccttgagtcatgaaaaggaatgtaaattctgttcaccgccttctgttttgtaaagagcacgcagtcagcatgacacggaagtcatgctccagaagtcagatgacctagctgggcccccgtcgcaggtctggggcaatcactccatctttctggaactcagttcttcatctttaataaggagagagggagaaaagattggcccagacagcctctaagatatcagttctaatgcaaaccaaaaccacagtgagataccatctcacaccagaatggctactattaaaaagtcaaaaagttacagatgctgctgaggttgtggagaaaagggaacgttcatacaccgttggtggaagtgcaaattagttcaaccattgtggaaggcagtatggtgattcctcaaagaattaaaatagaactaccattcaacccagcagtcctattacttgttatatacccaaaggaatataaatcgttctatcataaacacacatgcatggggatgtttactgaagcactatccacaatagcaaagagaatcaacctaaatgcccatcaatggtagactggataaagaaaatgtggtacttatacaccacggaatactatgtagccataaaaaagaatgagatcacgtcctttgcaggcacatggatggaggtggaggtcactatccttagcaaactaacgcaggaacagaaaaccaaatactgagtgttctcacttattagtgggagctaaatgatgagaacacgtggacacaaagaggggaacaacacatactgggatctgcttgagggtggagagtgggaggagggagaggatcagaaaaaatgactattggatactcggcttaatacctgagtgatgaaataacctgtacaacgaaccc[353 bp omitted]gaggcaggagaatggcgtgaacctgggaggcggagcttgcagtgagccgagatcacaccactgcactccagcctgggcgacagagtgagactccgtctcaaaaaaaaaaaaaaaaaaaaaaaaacctgctcgtgtactcctgaacctaaaattaaaaaaataaaaaaaggatttcagttctaaaacttctccttttcaaggctgtctctggagatggaactacacagactttgtccaaagctctcaacaactgtcagctgctgatactgttaccattaccaatatcattcccattttgcaaatgagaaaacagagagtcaatgaattaaagcagctttcccaagatgacagagaagacaggtcagcgtttcctgagctatgttctcataataagtggtcacatgccccaaaggagtcctgtggtcaagtcagttttagaaacgctgtctgctgggagcatctcagggcatagaactatagcaaagactccaagtcctgtttgtttttttaatctcatcttcgtttaatttagagtttctaaatgtattagtctatggagtccttttattccccctaggaaacaatagctcaggagattcagtctggaaagtgcttgttcagatagtttggcttttcttcagggataatgccaaaccttccatgacacactcgaaggaattcaaattgacttggccttctgcagaatcgcttttcctaagctgtcctgtgtaccacgttccttgttctctataagcagctgccttacaaagccagtgcctgcattggttgcagggatgctgttgagaacattattcatacagtgtcaatgaagcctcatcgagaaatttcagtgagaactaagtgctgggaaaaggcacattgtctcggaggaaaccttattttttcttattctagtataagagctacaggtggcttttcattcaggttaccagcaagctcagaaacaattactgcccctgtctaagacccttaagaaccaagggcagtctgtatttctctccatccttgacctctgatttcaacttgtactttcccaggtccttaagtttaaatctgtaggcgactcggtcgtgtatttccgtgagtaggttcatctcctacgggaatgaagtgagatattttctaataacttttgggcaatctgaagttctcctgtagaggtgaatccaagttgagagggattcagaaactcaaaatttggagtggatggactagaagccatggtctcagcaggagatgtgcctgtgggagtgagctgctggagggcagcatctcccagtgaatcttgagatgaagtcttgctcttgttgcccaggctggagtgcaatggcacgatcttggctcactacaacctccgcctcccaggttcaaacgattctcccgcctcagcctcccgagtagctgggattacaggtgcctgccaccatgcccggctaatttttgcatttttagtagagatggggtttcaccatgttggccaggctggtctcaaactcctgacctcatgatccacccgcctcagcctccaaaagtgctgggattacaggtgtgagccactgtgctgggccctcccactgcatctttctttacaacagctaagggcaagggcctgaggacctccgggaggctgaggggagggggcccgaggatttctggagtctctgagaccctattgtgggtcataggggtttttgaggccaaaactctttttacgataatattaaaatgttatttgcctttttttcgctcttattctctcatgagcacacagtggcatttcccagagaggagtttccatgacatatgctgtcacaacagaatgaacgcaggagtggacatgagcaccggcctgtcctctgttaaactagacattaaagggatctgcaagtgcgtcaaacaatgccactcttctcacaaaacagttttgaaacttttttccataaaaaatgctatttctgttaacatactttttatcattatttaaaaatgaatgaattaaacaaatgttttaaaattttctgttttaatttctattgtggcaattatagatacaaccatataaagaaaagctctctgggaatcctcaataaactctaggagtgtaaaggtgaaatgttgagaattgctacttccagaacacacttgcttacaaacgccctcctttgggctataaaataattctgttcaaacaggctttaaaatgtaggctaattatttgttttagggaactcctttttcctagctgtgtatatttcatgaatttcactttttttttttttttggaaaagtagggaaagtgcctctaagtcaattgctgttttgttttttgtttgtttgtttttttgaggctggcctggaactcccaacctcaggtgatccacccacctaggcctcccaaagtgctgggattacaggcatgagccaccgtgcctggccccaatttctctttttaacgaagtgtgggcctcaagctcaagccttcagcaagccacagtatctcactagaatttaatgaggctgttttgcacaactaatggattcagtagtgggtccctgctactgctctgtagactggggctaaaagggtttcggtgctaatgcaatggttctcaaagtatggaacccgaaccagcagcgtcacttgggaacttgctgaaaatgtaaattcatgagttctcatctcagatccactgagtcagagactctgcgggtggggcccagtaatactcctcaccctcccaggtgatcctgatgttgttaaattttgagagtccctgctctgcttctctgtcaggttcattcttccacccaaccaactggcaacctcctcggcccagccgaccccacgggcccagtgcctgtcccctcctcctaccatgtccagctgcttgtgggtgtcctccagtgccacctcagtcacctccttcaggtgcttgctcacgatctggaagaggttcagcgtggccatcttaatggtgccaagcaggagggtcttcttggctgcggtgttctggatgtgcgcccagcgagattcctggagagtggataaggacggggcatgagcacagcatgtggtgtgtgtgtgtttgtgtgtatgtgtgtgtgtgtatgctcagggcccgcactcacccagtgcctgggagcccccggcccgccccgggcccctcacccagaagatgacattgctgcgggcacggtcaaagcgcatctgcagccttgccagctcattgttttgctgcaggatctcatcatccttttcctccatgtagcgcgccagccgggccttggcgcgctcaatcttctcctggccttcctgcgcagactgcatgaggtcgtggcgcatgctcaccagcgtcttgtagcgtgcaatcacctcatggatctcctcgaactgtggtcaggggctcaggtcaatgcacagccagcccctggggcctgagggagccacccagtcctgccaacctccagcctggatgcctggacacctggacacctgggcaggcaggcccttggccagggtcacggccagaggctgtgagggacactggggttccgctgcctgcttctcctgggtttgtacgggccacggtccatttgttgggcagggggatgcacaactgggctagggattttcgactttaactgcatgtgagaatcacctgtaggggctttaaaaaggacacctgccagtctccacccccagagattcagatgaataaacaagtcttctgtggtctctggcatctgaattttgcaaaaggtcccctggtggctctaggcacagccagggttgataatcgctgatggaaggcattttgcaatgtcttccaaggcaagaatttcctattcaacaagattgtaccaggaaccacttacaagccaggagctatgctaaatgctagggaaatagcaggagttaggaaaaccagattctgctcttaggaagcttacagcttggggggtggcatggagggaggacagacagacaagtaaacagtcagttacaacagcaagataagccctatctatgactgggggatagggctggaggggactctgggaaagccttcacgttggtgatctctggtatttgttcatttactgagggagaagcagggatagagagggtgctggtggggcaggtggcctgccagactcagctcacctcccccagcctggtccagaaccatgccactctggccctaaccctcaggtcccactcagtggaacagaagccatgaaacccacgctctttagaaggcagcatgaacaccagttctgtgataccaagttgccttcctaggggcttatcaaagcatgcctttcagccgcccaggggaaacttcccgagcaccttctccatctcgtgacatctccagtgatggatgcgtgtcctgggaactgccctgctggcctttccccaaatatgcctctttggggaagggccacccaacccagcacggaaagaggtaggaacagccagaaaaggtttcatgggagaaagtgtggctgaaatgagatgagaggtatataaatagaagatagctagcaaaagcaggtgtagggaggtgaggcagtgctacaggtgaaggagacagcctgggcaaagatgaatggaatagggggttgtatgttcaggatgctgaaggtagcctgagttcaagatggggagggagagactgagaagaagaagaaaggaagaagaaagcagaagaagaaagaaagagggaaggaggaaggaagaagaagaagaagaaagagagagagggagggagggagaaaggaaggaaaagaaaaaaagaaaagaagagggagggaggaaggaagggaaagaaaaaagaaaagaaaaaggaaagaaagaaaaagaaaaaaagaaaagcaagcaagcaagcgagctcagtaaaccttgggaaggagtgtggactttatccattgaaggattttaagaaacagacaattcacgtgtgcatttctgaaagttcatctggcacacagtgcaacagtgtaccacagttcaaataaatggaccacatcagagctactaggaacacacctctaaacttaatgctgatgtcaaaaggatttaggtgccaaatcgaagagccacccactgcccaaagatgagatgatttgaacattagtaagaataagtgcaaaggattaaaacatatcaaatatgttaaaaatccatcagttcacaatgatactagaaacattacaggtcagtgctagagaacaaattcattattctgaaaactaaataaagcatttaacaaactttctctgcgagacccacatagtaatcaaatggtggatgaaggaaaggatctctttatgaagtccttttctttatggtagtattctagcaaataaatgaggaagggttgctagtgagtgtcttcccccgaccagtgaggaaaccaatattctgacttctatcaataaagattaattttacctgtttttaaacacatcaatggaatcatacgatataacctcttttgtgtctggcttaagaagcataccaactaagggcagtgtgaggaccttatatggactctcattggaacaaaccaactgtacaaaaagcatccgtgcaataatttgtcttaaaagacagggtctcactctattgttcaggctggactacagtggcataaacacagctcactgcagccctgacctcctgggctcacgcagtcctcctgcctcagcctcccaagtagatgggaccacatgtgtgtgccaccattcctgactgatttttattttttaattttttgcagatttggggggggtctcactttgttgcccaggctggtcttgaactcctgggctcaagtgatcctcccacctcagcctcccaaagcactgagattacaggcatgagccaccacgcttgacccattttgtgcaataaatgatactgatatttgatgttaaggaattactatcaattgtatagtaggtgtgacaatggtgtagttattttaaaaagagctctcatctcttagagatacatactgcagagagacgcaaatggatgaaaatatattgtttgcttcaaaatggcagaggtgggaaagtgtgggggatgtgactatgaattaatcattattagaatcaggtaatgagcaacaggtgttcaatagactattgtctttacttttgtgtatgcttaaaaaattccgtataaaaagttacaaaacattaaatgtgacaaaataataagcatgatttgagatttttttttttttttttttgagacggagtctagctctgtcacccaggctggagtgcaatggcatgatcttggctcactgcaacctctgcctcccgggttcaagcaattctcctgcctcagcctccggagtagctgagattacaggcacccgccatcacgcccagctaatttttgtatttttagtagagacagggtttcaccgtgttggccagggtggtctcgaactcctgacctcgtgatctgcccacctcggcctccccaaagtgctgggattacaagcgtgagccaccgcacctggctatttgagaatttttgaaagcagaatactcaaataaaaagttacaaaacgttaaatgttacaaaatgttacaaaataataaaaagcatgacttgagaatttttaaaagcaggatactcgtgatgtctgaggacaggtgaagaaacataagatttggaaggacacaaaggagttcatttactggatttcaattatcggtagtgtttgatttaagacaaaagaactgggggcagatggggaaaatacgaagatttagcaaagctgtgtgatgagtacttggttgctgttatgtgtgtctctatactttccagtattcttaaagtattttgaacaaaataaagaagaaaaaagagaaagagaggggggctgggggaatgctgaacaggctggccaggaacgacgccagagttgaactccagacgaggtaccactggtggcctggatgaggaaggggcaggggctggattccagaaatacttccaaggcagaacagaccagatctgctgattgatagctgtggcactgagcaggagggaggagccaaggaggcctgagttctggcggggctgtgagtgggtggtcctgcctttcaccagcacaggtcgtcgcgccagcggcagggctgtcctgggggtggcaggaagcagatgagatgagtgtgcatgggatgaattaaatatgggggtctcaagcttaggagggagagacaggccaatttcctccattctaagatatatattttcccaactctgaattcaagacacatcttacaatttttttttggtttgtttgtttttgagacggagtttcgctcttgtcgcccaggctggagtgcaatggtgcaacctcggctcactgcaacctccgcctcctgggttcaagcaattctcctgcctc[224 bp omitted]ccttacttcctgcccccccaacaaaccccaactatgaaatgaaccactgaccttatagtacgtagcacctttgagtggaggaaataatgcagaggtgggactcatgcatgagtaaattaggttagtggtttgatatggaaattgtgggacctttaaacagttgtgcatcctgtcgccccttccctcagaggacatggatccacacccctggaggaggtgcctccatctgccctagtgaggggatcttctggctgttggtcacatgggggaggagataatgtgacatgggtggcatccatgggaggccctggacattgctaagaagaaaagtggaggatcgctcacgcctgtaattccagcactttgggagcccaaggcaggcggatcacgaggtcaggagttcgagaccagcctgaccaacatggtgaaacccatctctactaaaaatacaaaaattagctgggcgtgatggcgggtgcctataatcccagctactcgggaggctgaggcgggagaatcacttgaaaaccggaaggtggaggttgcagtgagccgagatcaagccactgcactccaggctgggcaacaaaagtgaaactccgtctcaaaaaaaaaaaaaaaaaaaaaagtggaggatctgagacagagaacctggacccaccacacaagaaggagctgggaagaggcgcccccgccggaggagcctgagaaggagaggtcagaggtaggagagagagggaggtgccactgagttgagggcagaggggggtttccgggaggggcatcggcagtgtcagacgctgcccccaagaggcgcggtggaaccaagaagttccctgggctccggctacagggactgcagggagagccctcatcaatggcactgtggggcccactgaggagtggctaaaagcaaaggctctccccactgacgagctgcgagactctgaacaggtgacttaacctctcggagcctccatttccttctctgtaaaaggctgatcagcttgggttcaccctggggctcaccagcgaactgaatgaagttacccgtgtgaagcaccaaccccggggcccagcacatacaaagcaccctagttctgcaggaggttgggtgtttttccaactcctctcccttcctctccccaatttactctccagtaaacagaagacactgagaggaggggatgcagggatagagggaggccacgtgctgacacacacccacacacacacccctttagacagacgcagccatggacacacatgcagacatagacacgcaactcatgcaagatacatacacagttgtggctcacacagacacacaaagacacaccactaggccccaccccttgagaaactcatccagcctcaccagaggcttcttttagctgctccccagtgccccccagggctgggtgcatctcctcggagcagggtgcccatcctgcagagctcctggggcccagagggtccacagtccccagccagctgagcctgaattccatcccatggccccaggccccggggaagagaggtggggctgaggaaggtgccagggccggcccccctgctccttggactcacctcggagttctccaccaccttctctaggtacttgttgaagatgtagtagtccttcagcttggcgctcagccgctggtgctccagccgcagcgccaccatctcctgcttgcgcttggtcagctcctgcatgtgctggcacttgagttctcgctccttgttggctttcttcatggcgcggatccgtttctggtcgttctcctggggcccggggaggtggcgctggtcaggaagcctcgcccagccctcccggggcccaggccttcctggggctggtggtgccctcagacccctctgtctgcacaaaccatcctggcaacaggcagagattgctgggccacccatggggcagaagaggggtgaaggaaaaggctctccaggggtatttgaagctggctgaagagatttctgtggactgaggtgggggctcagggggctgtgaggacagaggtttaatccaaagtcgagaggtggccctggggctggaggggcagacaggaaatggttctttcctgtgggacttgggctctggacttcagagagtggactggggaagacctacattgcactgggctcacggtctggaagaactcaacccgccgagaagactgagaaaagtccagaagtgggagcaagaaccctcctgacaaagcttctgtggtttctgttcttagtggtggccattttccatggagcagaaggaccactcccggaccagagctgggaggcgagaattttctcccaattcagtactcggtgcttccattttcccagctgtggagatgggaggcaggagcccctctccctttcagaagctggggcaacagggctggagctccaggaagatgagagaggagatgtgcctggtgccatagggcctggggggtaaggccactgggagagcatgctcctaggagctcagactggcatcccgctgagggaggagatggaacaggcagttcaatgcccagaggacagaacgaggctcagttaccgcaatcagtccaatcctgcctcttccttctgcagagccctcccctaagattaggggcaagcccacccctcgccctgtgtggctcctttctcccttcaggggctcctgtgattccacatagacaggcgtatgtggtggtggcacttggaggccactgaggaaggtgcatgcaggatctgtatgctgccctgtaagcccaggacaggactgagggagtctaaaccagtgactttcaaatccacctggtcatcagaactgcctggggaacttttttaaaaatatacaagcctgggcccaacctcagacgtgctgaaagcaacaagggaagcccctggggtctgtatttgtagcaaactctctgggaattgaagctactgaccctctgagagccatttggagaatgcctcacgcccaaatctcttctgccccaaccactccataagtgtttctctggctgctaagaagaactggacctctggagaatgtgcccagtccaaggacttcctgtcccacacggcttaggcacagagcaggaaggaaggtgcttaagagcggggcttctttgtggccgacggcaatcattacccactcccggagctggaccaggcccttcagggctgcgtaagtgctacctggagtgggtctggataaatctggatttttaagacgattaaagtgctccactaaagactgaagtgagagaggatgtcttggaatggactctggtgcctggtccttcaaccatcccctgcctggaccttcagtgcaaggacaaggatggaggggtggggtgggtggagggactaaaactctgtctcattcatcactgtatttcccaagtgtttagtcctaactgtagcaccttcattcattcatccatgcattcatttactgaataaactgtatgtcctaggtactggaaaagaaataggaaacagccatctagagggagcagagactgataggtaaatggaaaattacaaacagagacaggtgggggacataaaggacgcctagggacatgccaggcaatgttggagcactaaggatgctttttaactcagggcgaggagtcagcagaagcaaggaggaggagtgcagtttgcccacctgcggactatggatcccctggccactgcggccgcccacaccccttcaaacctggatgaactgctcagacttctggatgtgagccttcagttgggcttccttaacgcccagttcctcccagcgcaggttcagggtttccattctgcgctgaaacatctttggggtgggggtgggagagcagagaggtcaggagggctcctgacatgagtaccaaggaagaccccagcatccctgccccagaggctccatccccaggcccaagagggtccataggagcctcccactttctaccccatgcctggcccagagcagagcatccctggacagtggtacccccaagacccagatcctttctgttctccccaaagagaccagatcaccatagaggactcctggctctagccaccccactcagacaatggagggctgtccacaggctctcccagagccccagcccacccccttcctttcctgcccctctgcactccatccctgagtccccaccttcttcttctgcaccatagtttgatgcatgatttctgtctcctttttcttctccagtagccagatggatggggactccgacgccccctcaacattggggagtttcctgtccaagatgtgaacgcgagagggctgtgtgttctgacatggggtaggctggggctgggagtaacccgtggagacagatacccatggggaagcagaggggcctctctccctttccgagggaaagggctgttgtgttgagaagcatagagggccatgcaggagtgagcagggggagggtgacggggtggagaccagcgtgatgaggtggactggtgccaaggttatttggggcactgggttacaggagaggaggggacagacggttggaagatgaggtatggggtgggtgtgagtggtcccaggcacagaggggtgggcaagccaggcctcagacactcactggagcatctgcagcagccgctccccatactgcagccggaagtactcggccaggtcttcctcttccatgatgcccagactcatggtggcagtgacctcacggcccaggcagctgactcttcacagtgaaattgtgggtagcagagccacaggtggctcaggggtggtggctgcactcttgtttctcccttcggcctacagggtcccacagatgatggagtttgagactccacagaaggtggctggagacaggttgggcggctcaggacgatgtgctggggcagttatgggagatgtggttacctagcaacaggctgcctggttctgtggccggcacgtggagtccaggcgctgccctctgccccctgccccctgcccccattggtcctccccttgctggggtcctgctctctgctcctgccctttgccctcaggaacttctgggaaggcattaggcctggttagatgctggttgccatggagcccagggccagaggcagtttctggtgagtgtggctgagaaggggcatcgggtggaggagcggccttgtgcgggcgccctgctcttagggcctccctggggttcaggtgtgggtgagggtgagggaggggccgggccttggtgaagaagagcagagaaagaaaggaggtgcttagcggcggcaggggtggagtcgcgaggaggcgcgaggttagaaaccaggcggcgggcccagcacgcggtggggccgggtggggaaggggggacgggcggggggtgcgcggggacaggcacaggaggagggcccaggccaggcccctcagaagaagagactcggggcctgcgccagt[132 bp omitted]tctcttgcctcagcctctcgagtagctgggactacaagcgcctgccacaacacccggctaatttttgtacttttggtagagatggggtttctccatgttggctaggctggtctcgaactcctgacctcaggtgatccacccgcctccgcctcccaaagtgccgggattacaggcatgagccaccgcgcccggccctgcgcgtttttgtttgcataaacttaaaacgggaagaaatgtcaaaacacggtaacggaaatgaccctatttaaaatgttgactccgtggtggccgccttccttgatcccgtcaggctgcgtgcattaactcatctggctggaggtcggacgtcttcgcgtgggacggcgggtgtgcggagggcgccctggggtctccggctggactctggccgggaccttgagctcgctcccgccaggcgcaggctccctcttctctctgcctccctccctcccacgcccgctactgccgccacgcccgccacaccgcccgttccgcttctctctgtctgggagggggagcggggtggggtgcgtgggttgtggtgggctaggggtctcgggcgggggcgtgtcccgagcgcggccagtccgccccgccgcattgccggtcgtctggcgccccctgctggccgtctgccgcgccctccatcccggcccaccccagccctgctcccctcccacgctccgccggagcctcccctccagagcggaccatcacacacacctgtcgcttccacctagtccggtgggctcagcagagaaagcaagacagtccctaccccacgcagaacacacccacacaatggccaccccaaccctaaacaagaggtggttctccaccggagccccggaggaacacgcccagcagggcgacaataagaccgccaagaacgattcaagctcctcggaggggcatgtttccttgtttatccacagaggctggcacagtcaatctgggcttcccctccctttctttaaggtcgtgcctaggagctgtgcaacgccagcccttgaggaggaagccatctgtttctggaatcaccctccccgccacgtatatgagacatatccttgattgtccgtgaaatcaggtggtccagggccaggttggtccatagaggtaggtgtaagacatcctctgctcctgcccaagggtctcctcgtatctggaagctctttctgctgcttggtttggtacctatcatgggagttttcgtgatccttgcacaccaccatccctctctggagtctcactgccctcccagggaccctgagcaagacgcagggctgtctcggatttacagaggtctgtcctatccccatcttttcccttcccttcccttcccttcccttcccttcccttcccttccctcccctcccctctcctgaggatataaaataactgaatagacttacaaaatgtctaaatgatggttcagtatggtaaagctgtaaattccatccaaatgaatttaggaatttaatgcgattgcaatcaaaatttcagagagtttttttccccatagatgttgacaaaacaatgtaaaagttcatctagagaactgagtacttaaggaactatcacaaaagaagaatgagagggaatgtccactgccagacaccaaaatgtgttctaaggtgaaagtgttaaaacagcatgttgctagtgccactccaggcaaaatcctcaagtgctctaagggcttgggcaagtaccttgctctaagatagccctgactttgtgagctgcctaaaggcatgaaaattcacaatattcaaacacacttctgacaaaaaccaaaacaagatcaaaaacacatctggagccctgaaatggggtacagggacccagtttatgatccttgacacaataaacagaatagaaaatccagaaagagtctcaagtttctataggaatgcattatatgctattacggcatatcccagtggggaaagtatagattatgccacaaatggtgctgggataactagctaattatttggaaaaaagaaacacatatagaaatcaaattccagatgggtttatttaaatgggaaattaaatgttcaatgtgaaaattcattatgtagcaggatattcaatgggaatgatacttttttggtttttttgccaatggtgagagacctgccagaacacagccttgatctcgcaagtcatatgtgagtctctgaagactttacaagtctaatttacaagtttaaattccaacccaaagcgtagagagtcttcatttccctgcatcctcactgctgtgaactgaatctgtgtgccccctcaaaattcatatgttgaaaccctgtcttagtccgttttcatgctgctgataaagacatccaagtctgaaaagaaaaagaggtttaattggacttacagttccacatggctgggaggcctgagtcatggcgggaggtgacaggcacttcttacatggtggtggcaggagaaaatgaaagggaagcaagagtggaaactcctgataaacccatcagatctgctgagacttattcactatcaggagaatagcacaggaaagaccagctgccacaattcaattacctctgcctgggtccctctcatgacatgtgggaattctgggagatacaattcaagttgagatttgcatggggacacagacaaaccatatcaaaccctaatctccaatataattgtacttggatatagagcctttgggatgtattagctcctaagggtggtaccctcatgatagctttagtgcccttttaacaaaagagacagcttgctttctctctctttgctctctgccatgtgagggagcaacaggaagacagccatctgcaaaccagcaagctgactttcagcagatgctgcttctcctggcaccttgatcttggacttcctggcctctagaactatgagaaagaaatgtttaagatttccagtctgcaaaccagcaaatgggccctcaccagacactgcctgtcctggcaccttgatcttggacttctcagcctccagaaatgtgagaaagaaatgttttaagtttcccagtctatgagaatttgttagaacagaacaaactgactaagacactcactaacatggtatattaccaatctcttaaattttgccagtctgataggtgaagttactcatctttatacagccatttcttcttctgtgagtctcctgttcatgtttcatgcgcattttaaacatcaagttgctttgcatttttattgatttatagaaggtctttatgtattctggaaagtaatcctgtatttttcatgcttactgctactcatcctaatacttttgagtggattggttggaccctcattggatgcagcaagggacaggaaggcaactcaggcagcaatccatggcaggctgaccaatagccagtcacacaggcagattcaccaagtcagcagaagaattagctttccctccttctaggcttgggattctctaacagcagagatggcactaaacaggagatgtgggcaatatttggtctgtttaccctgtgactacatcattggcagatagatacaacagacctgcagtccccaagaatgttttgaattttttttttttttgagacagggtcctgctctgttgcccaggctggagtgcagtggtatgatcacggctcatgcagcctcgacctcccaggcccaagcaatcctcccacctcagcctcctgggtagctgggactgcaggtgtgcaccaccacacctggctaagtttcgtattttttttttttgagatggagtctcgctctgtcacacccaggctggagtgcagtggagtgatctaggctcactgccacctctacctcccaggttcaagtgattctcctgcctcagcctcctgagtagctgggactacaggcgcatgccactatgcccggctaattttttgtatttttttttgtagagacagggttt[132 bp omitted]gccatgttgcccaggctgctcttgaacttctgggctcaaaccatctgcccacctgggcctcccaaagtgctgaaatgacaggcatgagccactgtgcctggccatcccaagaatgtttggagtgttcagggtcagtgcagactcttgttaactccctaagttcatcccattataagttcacccctggacattgcacaaacgcttctcaaattcctcccagatcttacttgcctcatttgcatgtggtttatggtattggtgacacgagggtcctagaatgaaggtaatctgtaacaatagcttcacggttccatgtgctggaatagtaattgcattctaggctcagccatgcttgtggttacacaaacatcaacactttgcaacctcctactccttatcttgtgtgtctgtcaagcatctcctcagagttcattgacttcagtgatttgatgtctactaactaacccgagatacttccctcctgtcataaatagttttactgtatgggccaaatgcaatgcagtgtctcacacctgtaatcctagcactttgggtggccgagggggacggaccacctgaggtcaagagttggagaccagcccggccaacatggtgaaatggtgcctctactaaaaatacagaaattagctgggcgtggtggcaggcgcctttaatcccagcttctcaggaggctgagacaagagaattgcttgaacttgggaggtggaggttgcagtgagccgagattgagccactgcatttcagcctggggaatgggacaagatccttgtctcaaataaa[137 bp omitted]ccccgtttctgctaaaaatacaaaaaattagccgagcatggtggcctgtgcctgtagtcccagctacttgggaggctgaggcaggagaatggcgtgaacacaggaggtggagcttgcagtgagctgagattgcgccactgcactccagcctgggtgacagagcaagactccatctcaaaaacaaacaaacaaacaaacaaaaagattcagcattattttccagggttaatagatttgttcaaataactaaaaccgcattaaacaaaaatgtcattggacaacaaataagcaatccagaccaatatggtcacagtcgttgtgaagatgagaaaacttcatctttattgcattttcccaggtagcgcagtgcactgtcctctttgaaacacacagctcctgtcctcctttcaaacacatgtcctctttaaagtaacatacaaacctttcaatacaagctaaaaaattacgtctgaattctcacagttcaataacaaacaaacactcaacatcaaataaaaatttatttttacaagaatttcggggaaatgccacctagctataaatagaatagatatattatgtaactactctaggtcataacagtgctcccttcagcagcacatgtaataacagataaaaagatttaaaaataaaacatttaggataaaaagaatcctctcttaaaaatgaaaacagaattatatctatgtgtatataacaggtgtaacacccatcacacaacttcataagaacagtgtcttttaaaaaatacttgtatttctaaactagttaaataaatgtagtaataatgccatgcccatcattttcaaaataaacaaataaaatgtatagtatatattggacatgttagtatatatggaaggcatgttaaaaatcacaactgaattctcacaattcagtaacaaacagtaaacagaaaataaacatttctatttgcaagaatgtaggggaactaccacctagctataaatataatggatatattaggtcagtatcatagattacaagagtgctcgcttcaggagcacatttaataatagataaaacgatttaaagagaaaacatttacgataaaaagaatcctctcttaaaaatgaaaactaaattatatttatgtgtatataacaaccgtcagagaactctataggaacagcatgttttcaaaactacaaaaaccccaaactattttaaatcaacctagtaataattctatggccaacatttgaaaaataaaccaacaaaatgtacagtatctattaaactatctcttaaaatcctatggcagtaatttcatattttacaaagaattccgtaacaatctgagtgcctgcgctgtgccttcaaatgctctggactgtggcaaccaagtccataggaaacaggaactccagcttccagcccaggggaggctgggattcagcaacgtgaaaagggaggttttgccgcaggaaggggtggaaccagaaacacccctggtttctcactttccctccactgactcctagaaatacctccatggctcctaggaggaaaacctggtcaatctattttgccccttctagaagagtccagcttcttctagatgatctgcacaggaggctcctctctcccttcctggtgtctggcattagcgtcgcgataaacttcctgctgaaaattcccatctcccctgggcccagtgttctggaagtgagagagaggatgtcacacttcaaggagggagatctctagataggaaggttattcccatcccacatcaatcctaactagagttcagagcaatatataaatctgattttatctctaaccctttattgtaaaccctgattctgaaccatcatttttgattctggtactcacactttggtgagcttgactccaaaaatcacttaatatacccaaggttagccccagtgatctgcttcatagcaaggactttgggtggctccacccagggagtagagcacccttggaggacgtggctttggacttcatcacacttggggccctttatattgcttaagatctaaacttttaaccatgctacaaacatgtctaacacgacaacctcaggaaccagcagaccagattcctaatccccaaccttaatctctcatgttttagtctaatgcttggtcctaaatgtggttagctgcacaagatgtcaaccaaatcttcactgaatcctttcctcaaatcagtaactcaagtgtatcaaccataatgaacctccctggacctaggtagtattctcatttttgagaaagagtgtcactctgtcgtcccggctggagtgcagtggcagaatcacagctcactgcagccccgacctccggggctctggtgttccttccgcctcaggctcctgagtagtggggactagaggcgcccaccaggacgcccggctaatttttgtatttttgtggagacggggtgtcgccatgttgaccaggcttgaagctggatcaagcagttgagttccttggattttcttatagatgagaatattctgcctttaccctggaggatacacacgtaccttccctcaggccgatgacctcaggcctccatgtccccggagctctaggaaatgagggtgcgatctcgggcccacacccagtgctctgggtcataagcctggatctggaaaaacacacaccacttgagaagccagggattccccaggaagccccctctctgccctcctccagcctccagtccaccccatccctccccacccccacctcctcatatggccccacctacctcctccatctcctctggggaaacccacgtcctccagcgcatggaacagaggagctggtatcgaagcttatggaacaagggtcgctgggagtagttcttcccgtagaggaaggagaagatgtcttgtttcggggcctggttgtcctcctccatgtcactggccaggtagctggggagagagatcaggttgctgctcaggggccccaccaggagggacccctgcctgagggcagcctctcagagaggagggcaggggaccttcctcagctcagcaccaacagccgccctgcagagagccctgccttcctcaggaggccccgctggacagagacctgctaagggtgcctctcaaaccttcaggaaggagatgatccaagtggtagctgggagtggtggctcttgcttggaatcccagcactttgggagtccaggcaggaggatcactggaggccaggagttagggaccagtctgggtaatatggcaagaccccctctgaatttaaaaacaacccaagtcttatgctaaggatgtgtcctgccatccttatacaagacagatgacgtcacctcatcctagtccccatccctgttcctcccacaccccccttccttgtcatgtatgcacacacctgtcttcccccgtgcatcataagtgcccccaaggacaggaactgactggtgtgtttctgtaaatcatctctcacctaccaaaaggccactagagggctttgtttatcttggtgcattaattcaacaagcattgctgtgaactctcccttcccatccttcctattccctggcacatatgatgaacttcataaggttttgttgaataaatgaatacatgaatgaatgaaggaaagaaggaaagatttatcttataggcaaatgccatatgaattattccatagagtcaatataacatgagcacttgcaaaatgaaaagaattgtgctgagtgtttcaggaatactttgatattttggctgattgggtggctcatgtctataataccagcactctgagaggctgaggtgagaacccaggagttccagaacagcctgggtgacatagcaaaacgtcatctctactaaaaatcataaaaactggctagatgtggtggcatgcacctgtagtcccagctactcaggaggctgaggtgggagcttcactagagcctaggagatggaggctgcggtgagctatgatctggctactgcactccagcctgagggacagagcaagtctctgtccggtaaagataaaaacaaaaaactttgatattttgacaagaccctgccttcaacaggggtctactctgatgggtttggggaaaaggagggcagataaacgaatccaaaatgtcacattatcctaggatgtcactaaagtgctgtgggcgtgcagaagctggaagatcaggggaggcattgcaaaggctgtggggttgaactgactttaaggaatgggtcattcccttcagatccacatgtgtgcaggacacccagacagaaaacacaaaatcaaaatggagtggagggcatttggaaggagtggcgaaagcaaacaaggaaagatgaagatggtgggcaggtttggtggtagaaggactgcagagagggttgaattagccctgtggacccgggcctccgtttagagacaaatcagctaaggaggttgttcaggtgggcagtgaagggggggtgggagctgtgctttggaaagctattcaggcagcactaggaagccccctggcttggggcaggactcgcaggaatgcccagcagggagtatttgatgatggatctgtgttatgcgaggacgacctgaatttctgcctctgtcatgggaacctggagaaggaggatggaaaattgcatttggtgttgatatgggaaggagagagacgagagaaccagaaatggctgcttgcttggggagcagggtcgtgtccacggctttcctttccccttaggacgggtttatgtttccttttgtttgattctactatttgtcaactgcatttgtgtttgtttttagaaagaacagactaagaacaccatagtataatcttatcgtttttatatacagagtaaagaggagaagtagggtaaaaaaatagatggaaggttggaatcccacttcgtccactgtcccagggtgttggatattgacagatgggaagaagcaaactactcacagagccaggaagaaatgaatgcgttggtattgccacgagaagaggccggcacggctaaaatacgctatgaccatagccaggagatactgatggagagaagggagtagagagagagaaaggttggtcacatcctggaagaggaagatggtggagagaagggaacaggggctggggcgcggttgtctatcacagaaggaacctcagtgttgggtgactatgctcattgggggcttgcgggtggagagtgttcaaagtcagctgcaaatccgggaagtcggagggagggaggtctgtgatgctcccatgatgatgagctccagtgggatcactggagggagagtgtctagggctgctaatgtcaggagggtcttggtgagctggggcaaaggactgtcccaaagatctgagaggataggggtcaggagtttcaagactggcccagggcctggattccaaaggaccctgtgcagaggcaggggccacccatcaactatgcaacaggctaccagagccccgagggagatgctgacaaattatgagaagacctagaatagctgggggcggtgactcacgcctggagtcccagctattggagaggccgaggcgggaggatcacttgagcccaggaggctgaggctgcagtgagctatgatggcaacactgcattccagcctgggcaacagaacgagaccctgtttctgaaaaaataaaaatcaaaatgtgggcgcccaagagtatggaatcagcaggtgggagatggtagagggagagaggagagaaactgtgggtttagacgctgcacccttccccaggacgtgtgttaaagcaggaacacagttgagtggagaacaaccttaccttgtctgacaccctcaggtctttgtcccaggccaggaatttttgaacgacaggatcccctgtgaaaagagagcctgtgtcagggtgagaagtggaacagggttgccgtgggagcagcagagcagagaggagaactgtgtccctctgggggaagtctcaggattgtggccaaggcttaggtggatgggagaggagagaaggactttcactgggcaaggagggaggctcccgctctgagattcccctgaggagaggccgaaggaggcctctggtgtcagagtctacaggatgaagagctgtgaataagccatgatgtcctcccatcagacaggaagggaccactgcagaagtcataatagaattcccatcattgcttcctgagatagtcacagctgggtgtgcccatggccttgttatccccctccacggatggagacacttaggtttagaaaagtcatcaagagacatagagtttcagagggtacagctgaaaccaagctttcttttatcttttattttattttattttatttattttatgacagggtctttccttgtcaaccaggctggagtgcagtggtgcaatcatagctcattgcaacttcaaactcctgagttcaagagatcctcccgcctcagcctcccaaagcaccaagatctcaggcatgagccactgcacctggccagaaaccaagctttcttatttcaagtgcagacctttattaagactagcctaatcctctatctcctaagcatcctcctcctgcatggagcgctcatcccccaggagggcatattcttcttattgggaaagtgtgattattgaaagattccacttttttaaaagaacagggttggaggtgctttttggggtatcctcctaccaaggagcctgttgaaggcctcgtggtgctcagggagcacggaggatgctcgctttcgcttcagcttcatcttgagcccacacagcgtctccaccacccaggtgtcctcgggctcaggggcgcgctccaactccagctcctcctccagctcctcctcggattcgtctgaccattcgctcttccttttcaggccaagggattgaggctgggggctgggatctatccaaggggctgagtgaagaaaccaggccatggtgtcatgtttctgccattgatcaccttagacgccccgacccaggaacctcaaactactcttccatcctcccaagcctcgcagactgtcagcttctccaagccatgtttccacctttctcctttgctgatccccatctgcctctccctcacctccccattcttccggctctctgtcctcaaaacatttcctcatcacagataagaactttcaattggagaaaaatggaaaccttcccttgagctctgtctgctctctctctctctctctcttttttttttttttgagatggagtctccctcttgttgcccagaccggagtgcagtggcacaatcttggttcactgcaacctccgcctcctgggttcaaatgattctcctgcctcagcctcttgagtagctgggactacaggcacgcaccaccatgcccaactcacttttgtatttttggtagagacagggtttcatcgtgttaaccaggatggtctcgatcttctgacctcgtgatccgtccgcctcggccttcctctctcatcttttgagcacatctcctgacccccttcattgctccccagactttctttacacgtggccatgcttggccccattccctgcaccctccttccccgatccctggcttcctgagtccgtcgtttctttcccacacaccctactcaggtgcttcagattcccagtaactggcccccttccctctcctcagtcaatcatctcccatcgcttctccctccagtcacctcacctgatggtcctggcacttcatcatccaccaccacctcgggggaccgtaccgttgtgctaggctgggggctctcctcctcaaacggggggcgcgcttgaccactggccataatctctcccaaacactttgtttctgtccacaaaacctagtccctgttctgtccaaagccttcttccagactccgttaggacccagaagagtgcgtttctcttctagaggctcgggagaagttaggagtgaagagtagttctgagaagttgctgttgtccacctgaactcccaagcaaccagagtccggtccttccaatcaggaaagtcggaatctctgatgtcatcggtcattccaaactggcaactactttgaagaaaaacacatgtaactgccagactgatctcttttcttggagatccggggtgaacggtatctcctggcaatgtcccaacctctgagcattgtccaaaagcatcctcagggtctccacattcctcttttccctgtcccagcagaggctgtgtcctctccactctaaacttgagggggtgttgggctctcctccccgcttctccttcccatttcagagtctagtctggtgagagagggaggaaggtggaaggaaatttagggtaagcagaatgatgagtccttccaagagtgagattaacatatacaggagatcctgggtaaattgacttgttgaatggagacgttacgtcgaagtactcaatgtggcaaagcttttttgctgaatgtttactgatattcactatcctggatcctatagtaggggaacatgcatcctttgctctcaggcatctttgagtccaagagacattttgaggaatgaaaatcacaggagactgtccatggtttcgtacagattttcaatggtgtccacaagttcagggcatccatggatcacctaaagcctgccctccagttcagctaaggaactctggtctatatatcaactattacaacatatctatttcacttgaccccaaaatttgcctactatttatgtattttatgaataaaatatcctgtgtataaaaagactaaggggaaaatctcagccaggcccaggggctcctgctcataatctccctcctttgggaggccaaggcagggcgtcacttgaggttaggagttcaagattagtctgggcaacatagcaaaacgtcatctctacaaaatataaacaaagtaatcaggaatcgtggcacacacctgtggtcccagtacttgggaggctgaggcaggaggattgcttcagcccaagtgtttgaggctgcagtgagctatgattgcaccactgcacaccagcctggaggacagagtgagactcagtctcaaaaatatttttttcggaaaaaataaaaatgtaagagctggatactatctcagataccatccaaagaacctgtgagttctggcacagcttcctaatgggctcctaggagtctctcgctgatgggaaaggcacaactgaatgaggaggcagatcccgtcgctgtggaagtccaattgttaggaaactctgcttacattgagtggaccttcgcattcacgatgctttcaaccatcagaactggttggatccttttacaacaaaacagaaaatcatctttctctcctatttaataggctttcaaacattagaagatcaatattctgttgccattaaaatttctcttctgtaccacgtaaagttctgattaatcactcttcaagccagttttacatattcctctgtcttctaggcaccttctgtagacaggctacaataaggcagccatcttaaattatgtcaatacattgtccaaaaatgagctaaacagttcaggtttcatctgatatgttcagggaaaagcaaaactatcacttctccccttctcttttccttcagtgatgcaggttaatacaacaatggctgtagctatgcaccaaagatatcattagagtgaaacagaagggctttattggctggcatggtggctcctgcctgtcatccctacactttgggaggccaaggctggagaatcacttgaacccaggagttggagatgagtctgagtaacgttgtgagactccgtctctccaaaaaaatttaaaattagcctggtgtggtggcacacacctgtagtcccagctagttcggaggctgagtttggaggagaagaagtgctttgcaaataccagcctttcagcctaaggatctcaactaggaacattaagatacagatgccaggacccagccccacagattctaattccaaaggactgaggtgggggctgatttaacttcatcattggagtccattcagatttggaactctctgggtggggcagcgcaatagagatcccaaagaaagcaaaatcactctcgaatgaaatgagcaggaaagattttttgagcgaggtaagtaagacctgggcctcacatgggagggctgtcaccaggctttgtatccttggcttagtgggaacttttgaagcagcctccaaggcccctgtatgctggtcgacaagccccctaacattggctcacaactgtaattccagcactttgggaggccaaggcaggaggattgcttgagcgcagcagtgcaagaccagcctgggcaacttggcgaaaccctgtctccaccaaagtataaaaaactagcctgggtgtggtggcgcatgcctgtactgccagctactcaggaggttgaagtgggaggatcatttgagcctgggaggcgaaggctgcagtgaggcgagttaacgccactgcactcaagcctgggtgacagagtgagactgcatctcaattaaaagaagaaacactaaaaattttcactgagaatataaaagaactgaatagagacttacaaaatgtctaaatgatgtttcaatatggtaaaactgtacattcaatccaaatgaatttaggaatttaatgcgattgcaatcagaatctcaaagagtttttccccccgcagatgttgacagaacaatgtaaaagtttatctagagaattgagtacttaaggaaccatcacaaaagaagaatgagagggaatgtccactgccagacaccaaaatgtgttctaaggtgaaagtgttaaaacagcatgttgctagtgtcactccggcaaaatcctcaagtgctctaagagcttgggcaagtatcttgctctaagatagccctgactttgtgagctgcctaaaggcatgaaaatccacaattttcaaagacacttctgaccaaaaccaaaacaagaccaaacacaaatctggatctggaggcctgaaacgggttacagggtcccagtttatgatccttgatacaatcaagagaatagaaagttcagaataaacccaagtttctataggaatgcattaaatgctgtcatggcatatcccagtggggaaagtagagattaagccacaaatcatgcgatcacaactagctcattatttggaaaacagacatatacaaatcaaattccaggtggatttatttaaatgggaaattaaatgttcaatgtgaaaattcattctgtagcaggatatccaatggaaaggatacttttctgttttttgccactggtgagagagctgccagaacacagccttcatcctcagaagtcacaaggctcacacatcatatctgagcctctgaagactttaccagtctaattcacaagtttaaattccaacccaaaatgtagagtcttcatttccctgctcctcagtgctgtgaactgaatctgtgcccccaaaattcatatgttgaaaccctatattagtccgttttcacgctgctgataaacacatacccaagactaggaagagaaagaggtttaaattggacccacagttccacatgcctggggaggtttcagaatcatggcaggaggtgaaaggcacttcttacgtggcggcggcaagagaaaatgaaagggaagcaaaagcggaaacccctgataaacccttcagatctcctgagacttattcactatcaggagaatagcatgggaaagaccggcccccacgactcagttacctccccctgggtccctcccatgacatgtgggaattttgtgagatacaattcaagttgagattagaatgggaacacagaaaaaccatatcaaaccgtaatctccaacgtaatggtacttggatattcagcctttgggaggtaattagctcctaagggtggtgtcctcacgatgggtttagtgccctctctcttagaaaagaaagagcttgctttctctctctttgctgtctgccatgtgagggagcaataggatgacagccatctgcaaaccagcaagctgaacttcagcagacactgcctctccaggcaccctgatcttggacttcccagcctccagaactgtgagaaagaaatgtttaagattcccagtctatggtaatttgttagagcagcccagactgactaagacactcaccaatatagtatgttatcaatctcttaaacttttgccagtctgataggtgaacttatacatctgtatacagccattttttcttcggtatcttattcacatttgatgcatattttaaaaatcaagttgctttgcatttttattgatttatagaagacctttctgtgttctcgaatgtaatcctatatttttgatgctcacttctattcatcctaatacttttgaatggattgattggaccgtcattggatgcagcaagtgacagggaaggcaatcaatgcagcaatccatggcaggctgaccaatagcgaggtgcccaggctgattcaccaagtcaacagaagaattagctttctctccttctaagcttgggattctctaaaagcagagatggtactaaacaggagaggtggggcaatatttggtttgtttaccctgtgactacatcattgggagatagatacaacatatcttcagtcccccctccccattttttttttttttttgagacagggtcttgctctgttgcccaggctggagtgcagtggtatgatcacagctcatgcagccttgacctcccaggcccaagcaatcctcccacctcagcctccttaacagctgggactgcaggtgtgcacccccacaactggctaagttttgtatttttatagaggtgtggtttcatcatgttgcccaggctggtcttgaactcctgggctcaaaccatctgcccacctgggcctcccaaagtgctgagatgacaggcatgagccactgtgcccggccattccaagaatgtgtggagtgttcagggtcagtgcagactcttgttaactccctaagttcatcccattataagtttacccctggacattgcacaaacgcttctcaaattcctcccagatcttacttgcctcatttgtatgtggtttgtggtattagtgacagaaggaaaggtcctagaatgaaggtaatctgtaacaatacctgcacggttccatttgcttgaatactaatcatgttctagactcagccatgcttgtggttacacaaacatcaacactttgcaacctcttcctccttatcttgtgtgtctgtcaagtgtgtgtcctcagagttcactgacttcagtaatttgatttatactaactaaaccaaacatactt[133 bp omitted]gaaatcccatctctactaaaaatacaaaaaaattagctgggtgtggtggcaggtgcctgtaatcccaactgcttgggaggctggggccaaagaattgcttgaatctgggaggcggaggttgcagtgagccgagattgtgccactgcactccagcttgggcgacagagtgagactctgtctcagaaaaaaaaaacgttttcctgtatgatgaacaatgtgcaacatatatatgcagatattttctgccagcctgctgtttgtcttttaattttatgttatcttttatcatagaaatgtaaaatatatatatatatatttttgagacagagtctcactctgtcacctaggccggagtgcagtggcacaatctcggctcactgcaacctccgccacccgagttcacaccattctcctgcctcagcctcccaagtagctgggactacagtcgcctgccaccacgcccagctaatttttttgtattttttagtaaagaccaggtttcactgtgttagccaggatagtctcgatctcctgacctcgtgatctacccgccttggcctcccaaagtgttgggattacaggcatgagccactgcgcctggccagaaatgtaaaatatttatctagctgaatctgttgatcattctttttatcttcctgagttttgtgttttctttaaaaaagtctcctgcacttaaaattatatttacatttagaattgtatttttaaatgttgtttatttttaattgtagtaaaatatacataacaacaaatttgccttcttaagcatttttaactgtactgttcagtattgttaggtat[136 bp omitted]cggtgaaaccctgtctctactgaaaatacaaaaaaattagccgagcgtggtggcgcgtgcctgtagtcccagctacttgggaggctaaggcaggagaatggcgtgaacccgggaggcggaggttgcagtgagccgagatcgtgccactgcactccagtctgggcaacggagcaagactctgtctcaaaaaaaaaaaaaataataaaggaacattttcatcttgtaaaactgaaattccattcccactaatgaataactttccattttgctcttcccctggcctctgacaactacctttctactttctgtctctatgaatttgattactctaggtacttcatataaatgaaatcatacagtgtttgtctttttatgactggcttatttcatttagcatagtgttttcagggctcatcattgggtagcctatgtcagaattcccttccttttaaagcttgaataatatccccttctattaatactatattttgtttatccattcatccattgatggacatttgggttaattccactttttggctattgcaaataatgctgctatgaatgtgggtgtttgaatatctctttaagactcggcttccattttatggagtgtatatatttagaagtggaattgctagatcatatagtaattctatttttaatttcttgaagaaaccgtactgttttccacagtggctgcaccattttacattttcaccaacaacgcacaagggttccagtttctccacattctcaccaacacttgttatttctgtttttttttaaatagtagccatcctgatggatgcaaggtgacatctcattgtaaaattatgttattttttaattacaaagctaataagtgactacattctcattatacatcattcgaacaatagaaatacatctggagccctatttgtccaccaccgaatcccgttcccagaggtgaccgtgcattcaacaaatacttatgtcgagtatctgtgatgggcctgatgctcttctgggctagggatgcagcagtgaacaacacaagctcttcactgttatggaagtgggaggaggaaacaaccaatgaacagtgaccatgggtggggaggtatggggaattgagataaaggaaccagtcagtgcccacagacacaagtacctcccataaaaccttctcacggggttgctgatcctccaggcctgtgggcacagggcctaggccctatgagcttcttgggagcctataccagtgtttccagcttgaaaataatcgctggctctaaaatgcaaaaaggaagccacaaaataaagaatacatgtttaattagatgcttacaaatgttaacacaccagcttcatgaattgctaactttagcattcatacaacatttcacacatttgaaagtaatctgtggatttaatttcctcacttcccgagaattcccaattatgcacagattttttggggaaaaaagctaagcaaattgtgaattaaatgagttactcagacaaataatttcaaaagcaaaattagaaaaatctttttgcctttttttcctcccaaattatttttaatgtcgatgaaagtgaattttaatctgtttgttatggcaacgtttagggcttagttaagtttgctgcagggttaggttgtctaaagatggccccagtgggttttcaataatacaacggtgcaaggccggtggcctccctgaacccaaccatcttttcatggaatgattctatgattccattttggcagtttgctgaggctgaggaagacaggacccctcagaggcagtttcaagggccactctcagggaaaggatgaggcagaacactggttgtactcatctcactgggcagtcatgcctaagtctggtcttggagaccagcctcaaacctcagcctgtgctgtggcttgtccctgacatgttaaatggcctcctgttctgttttcatgaccaatttcccaatgctgggattactcagaagagaactcccactggtccaaactaacagctctgctaggcagtagctgaaataacgcctttccttctgaccttgagtgttctggaactgtggctctctgccttcaccaggaagctgaccgatgctctaggtccacatatggaagtgactgctagtgacctcttcatctagaaagacataagtgggtaaaaggaagcttcttatgctctgccccaacttattccatccattttctttttctccttgcccagaccccttcagcgaggacaactttcttttatctgaagcatttcaatagtcatacttctcagtcttcagacttcaaatttgattctcttttatttatttatttatttatttatttattttttgagacagcatctcatactgttgcccaggctggagtacaagtacagtgacgcaatcatggctcattacagcctcgacctccctgggttcaggtgatcctcccacctcagcctcccgagtagctggaactactgggatacgccaccacaaaaaaattacaaattttttttgtattttttgcagaggtggggtttcgccatgttgcccaaactggtcttgaatttgcagcctcaaggaatcctcttgtctcaggcttccaaaatgctaggattacaggtatgagccacctcgcccggcccaaatttgatttataaaaagaaaatgttgcccccgaacacatccctatgtagtggaagtgtacagaataacaaatttagcataatagttaccatctcctggtgatggtggagggaaggacatggcaccggggaggcttactatatattggtaatgagtaatagtttagattgagctctggggacatggtgcttattattattatgtgtaccttttgctatatatgcaatatttaataataaattaaaaagaaaatactacaattgcttatatggtggttaatcatttttgtcattcttcagtcttggagattctcctccaaatctcgtttcaatcagtcgttttccctttcttttgtgaacctcgactaacatccttcaccttcttatttcctgaaacttgattgacattccaccttctaaatgtgacatccattcttgctaataactctctcttgttgggtattcccccactttgtctctttatctccttggaaactgtgtagtcttaaaatatttcaatgttccttacctgccacttcttcacttaccacacagaatcccagaattgtggagctagaaacacctgagatcatcgactccaagcttttcatgataatagaagaaaaacagtggagacttggagattaaacttcatctccagcaatggcgaagctgggaactgaaatgaggctaacgtcaggcttcctatgagattgtaaccaggaaagggtcctgtccctggagatgctgcagaaatgggagggaggttgatctctggaggttcctccagaagaggaacagatattatggatggggactagtgtgggatacgatgaggtttctcttcaaaaaatctgatcaatcttttattctttaatttatagtaaccccccccccatttttctccctttttctgtttttttccttcttgcctttgttagatgcccaggcacgccacagtaccaggtgttatcagtaccagctcacattcctttccttatttggaaagaggactaactttctggctcattacagacaccccttcccctttccctccactttcttttacgtgcccaccctatctaaaaaaaaacaatgtttagccaaccgggattagtttacattgtacaacccgaccccagccaatggggaaagggtacagggcaggacttgcgtcaggaataaaggctctcgtgcccctttgttcaggtgtgctctcacggcaactggccaaggaggcacccctctgcacagaagtaaaattgctttgctaagaatccttttttcgtgtgttcaatttccttaggattttgagcattattcctaacagtaggggatgtcagactgttgatctgtcgccttcgttttgccctggcaagaccccggcacaccctgttgccactgtatggcaaaaaaacagcattagtccagggccaacttaatgccaactcggagcagcgaggtgagaagggagcagtgttacagcagatacaagggccctccagtgggagaaggctgactacgccctcttccacaggtgctatagactgaattgtgatcccccaccgccactcccaaatttgtatgttgaaatcctaatccaatatgactgtatttggagacagggtctttaggaggtaattaaggctatatgaggtcataaggattggccctgatctcataggatcagtgtctttatgagacaccggagagcttgcttgctccctctctccgtgttcacgcacagaggaaaggccatgtgagcacacagtgagaaggcagccatctgaaacccaagggagagccctcaccagacaccgttccggccggcaccttcatcttggacttcccagcctccagaacagtgagaaataaatgtctgttatggaagccacccagtctgtggtattttgttacagcagcctgagcagatgaatataatggaacaggcagttgcaacagagggaggcagcccttggaaaagaataatatctgagaaagaggctctggaagatttgctgaggaaaagtattgcctgatttggggagacaaaagggaagtggttggtttcagactgcaacaccagaggctctctcagtcgacacatatgcattggcagccaatgtagttggtagtcccaaggacaagaactcacaaggaaaaagaacgggatgtctgaggagggcaacggtcatatgaagggcaacggtcatatgagaaagataaatggaacaatctgtatcaaaggaaacaaccaatcaattaatagaatcgaaattaaatttgaaataagcataacaaatgtgtttaaagacatgagggaaggtatcagaaatgtgaagcggaagcaagcccaaatattgtcgaacaaattagatggacatcctgaatgtgaagactgaatgaattaaagaactcaatggatacactgagtggcaggatggataaagacaaagagcaattagcgagtggaagaccacgttagcaactctcctagagacatcaggaagagataaagaataaaagctaggaaacaggagtgaggtaaaaatgtaagatttaagtagtaagatgagtctcataaaaagaaaatggagaaggatgaaataatctgaataaaaagtgaccaagaatttccaagagagacttcagattcaccaaaaaaagctcatatctaagaagacaaaacaaaacattctagccagacccagacatattacggtgaaacttaagaatagcaaagacaaatagaaaattactttttaattcaatttttaatgttgggcagatagttgattctcatggttcaaaagattcaaaaaaggagtatatagtgaaaagtctaacgttcatttcttcttttatccatccatttcccaacccttccgcatagataaccacttgtattacttttggcatattttgcagagtttctttatgcaaatatgagcagacatgaatataatcctagttttctttctttctatacaaaaagttccatatagatcctgttctatatttttattactttttattttgttaatatacattagggatttttccatatcaatacacaaaaggtgcttttaattgcataattttttttcattgtatggccaaaccctaatttatgtaactggtctctcactgatggacatttgggctattttcagtttttttttgtaatagataaccttgtataaataccatttaatgaatcggcaggtgtatctgtaggatacatttcacaaagtaggatttctgggtctacccacttgtttttctgtttctgtgaactgcctgtgatatcctttgcctatgagtttattgagtttatttacaaatctatgccttttccttatagatttgtaggagatttgcaggaagaatagcctcttggacatgaaatgggtcgcaaatatttttcccagtttgtgttttgacttacgctgaggtgttttttttttttttttttttttttttttgagatggagtcttgctctgtcgtccaggctggagtgcagtggcgcgatcttggctcactgcgagctccgcctcctgggttcacgccattctcctgcctc[224 bp omitted]taggctggagtgcagtttcataatcatggctcactgcagcctcaacctcccaggctcaagtgattctcccaccccagtctcccaactagctagaactacaggcatgtgccatcacacctgcctatttttttctatttttttgtagatatggggtgtcactgtgttgcccaggctggtggtctcaaactcctgggctcaagtgatactcctgcctcagcatctcaaagtgctgggattataggcatgagctactatacctggccagtataattttttctttttatgtattcaaatgcattaatattttttatggcttctggatttttgagtcatagtcagagaagctttctctattgcaaagctattaagaattcttccatgttttctttaaatactttcatggtttcatatacttttttttttttttttgacagggtctcactttctcacccaggctggagtgcagtggcatgatctcatctcactgcaacctctgcctcccgggctcaagcgatcctcccacctcagcctcctgagtaactggtactacaggtgcatgccactactcctggctaatttttgtatttttggtagagacagagtctcactatgttgcccaggctggtcttgaactcctgggctcaagcgatcctccccacctcggcctcgcaaagtgttgggattacaggcgtgagccactgcacccggcctggtttcatatcattttatagtttcactttttactttttgtttttgagcccgttggagtttttcctggtgtagggtgtgagataggaatccattttttttccctcccatactatggttgcccaattgtctccaaatcacttactgactagtccttttcttcatgaaaattttctgttctgtcagtatgtctattcatgtggttttacatcttttagggctggtccaatctcactgtacttctcttttagtcttcatagctattcttgtttatttttccatatcaactttagaatcagtttttctagttccaaacagagcaatcaactaaacagcagcaacaacaaaagccagccagctaatatttttattagtactgcattaaatgtacaaatgaatgtagaccatcttt[135 bp omitted]acctccacttcccaggttcaagcgagtctcatgcctcagcctcctgagtagctgggattacaggcatgtgtcaccatgcccagctaattttttgtatttttagtagagacagggtctcgccatgttggccaggctggtctcgaacttctggcctcaagtgatccacccgtctcagtctcccaaagtgctgggattacaagcatgagccactgtgcctagccaaggcctgttttaatttttaattttaacttttgtgggtacataataggagtatatatttatgaggtacacgagatgctttgatataggcatgcgatgtataataatcacatcatgtaacatgggctgtctagcctattaagcatttatccttcgtgttacaaataatccaatcatactcttatttttaaatgtataattaaattattattgactatagtcatcctattgtgctatcaaatacaaggtcttattcattcttttcaactaaactttttcatttgtttcagtcttctttttttgtctttcaatagaattttaaagttttctttatataggtcttgtacgttttttgttaagttcattcctaaatatgctattatttagtcgttgttgagacagaaaattctaaaagctcccagagaaaaagaaacaataaccacattgacatcaaacttctcaacatcaaactgaaaacaattgagtaatattttcaaatgactgaaggacaagagcgtttcaaaacctagtattttgtatgcattctaactactattaaaatgtgattatgaattaaaaatattttcaggcacataaattctcaaaacatttaccacatcaagatcttctttgaaaccatttaacaaattgctttcttagtgtctgccctagggattacaattagcattttaatttccaaaaaaactacttcaaattaatactaacttaatttcagtaatctacaaaatctttgctccaatatacctccgttccctccctgcttctttgtgccaatatggttatgcaaatttcatctttatactttatacagctatcagtacagttttataattattgctttatgcagttgattttaaaaagagaaagagttaaatcagaaagagagaagagttataaacaaaaatatgtttatactgccttttatatttatccatttagtaacctttactggtgctttttattttttcatgtggattcaagttactgtctaatgtcctctcatttcagcctgaagggctcccttttgtatttctgataagctctactagtgatgagtgctctcagtttttgtttatctggaaatatcttaacatctttatttttgaagtagagttttgttgtatagagaattcttgattgagaatcttttgacacattgaagttgtcatcccagtcttcctgccttcatgatttctaataagacgttagctgtcaatctcactgaagatctcttggacacaataggttgttttcctcttgctgttttcaaggttttctttttgtctttgactttcacccacttgactatgatgtgtctagtgtggatctctttgagtttttctagttggggtttgttaagcttcttgaggtatgtacactagcggttttccccacacttgggaaatttttagtcattactccaaatattttttatttctctttatgcttcttttcttcttctggaacactcattaaatatatgttggtatgcttgatgatatcccacaggtctctgaggctgtgtttatttttcttcattctgtttttactctgttcctcagatagataatctttactgacttatctttgactttgccaattctttcttttgacagctcaaatttgctatcaatcccctttagtgaatttttcatttcagttattgtatttctccactctaggatttctatttggcttttttgggggtaatttctatttctttgttgatattctctatttggtgagatattgttgtcatctttttcttgaattctttaggcatggtattctttcattctttgaacatattttaaatagttgatttaaagtctttgtctactaaacttgacatctgtgtgccctaagggatattttctgacggctgtttatttaactgtgtatgtggtatacttttctgtttctttgcatgtcttataaattactgatgaaaatgaacttttttttttttttttttttgagatggagtcttgctctgtcacccaggctggagtgcagtggcatgatctcggctcactgcaacctctgcctcctgggttcacaccattctcctgcctcagcctcccgactaggtgggactagaggcgcccaccaccacgctcggctaagtttttgtagttttagtagagatggggtttcacc[137 bp omitted]ttttgtcctcgtccaaactcttgctgaaatttgatccccaatgtggcagtgttgagaggtgggcctagtgggagatgtttgggtcgtgagggtggattcctcatgaatatattcatgctttcccatgggggttagtgagttttccgtcttgtgggaatcaattagttcccatgaaagcacgttgtttaaaatggtctgatttcctcgattcctctctcttgctccccttctcgccatgtgatctctttgcacatgctcacttccccctggctttctgccatgagctgaagcagcccaaggtctcatcaaatagagatgcccaatcttgaactctctagccatcaaaatcatgagccaaataaacctattttctttttcctttctcttttttgagacaaggtcttgctctgtcacccaggatggaatgcagtggtgcaatcacaactcactgtagccttgacctccttggctcatgcaatcctcccacctcagcctcctaagtagctgggactacagatgtgaaccaccatgcctggctagtattttattttttttgtagagatggagtctcactatgtttcccagactagtcttgaactcctgggcttaagcactgctcctgcctcagtctcacaaagttctggggttataggaatgagccactaggcccactatctttttaaaaataagctacccacccagtctcaggcattctgtcatagcaatatgacagactaagatagatagtatattgtaacaacatggtatgagataccctcccccaggtttgttgctattgctgctttttatgtcattgctttcctgtttgcttcttatgtgcttagtgcctttcctggactaattctgtagattctatattccctgcaatatgcaggtcctgagttctctgttagcattttaaagaagggttattattttcatttttaagtctggtttcctagggttcagtcctaggtcagtataatttagtggtcagccaataatgattggtctgaagatttccctaaatgctttgtctgtatatctttcaccatttgccaaggggatctgtagctgaaggcacagcttcacacttcaggtagtttataagacagccttagctttcactttttgcttgtacagggactcaggttcagccagaggtgaatgagtggggccttcttctttccaaggtctttcccaagcatgcatatgagtacagccttctacatccccaggaatatgttggagctttttaaagttccctgtggttttctagttctcaagagcttccttttaaatttttattgctgttggccaggctcttgtttgctgcaaccagagtcacagacttaggcagctgagatattgccatcagattgctattgtttttggcaatgccctgggacagcttttttgttgttgttgttgtttttgtccatgagctgagttgtgaatcaaatgaaatagccacaacatcttgggaacagagattttccaggtagctgctaatttggacaaaatattgagtgtgctctaggcatggggcttttaatggagctccaaaagaggtcagtcatctccattagctccatgtctgctggcttttcatggctactgggccaccaagctggagagggagagaggatgggaatagcttcaagttaaaatgccacagacaccattgtcttattgaagttcagtatttttctcttggatggatgattttcagttccttctgtggctttggtatacttccaaagttctgaaatggttgatttgagttgtttttgccagtatttttgttgtttttaagggataatggctcaccaagttcctcatttcaccattttagaaggcaatctcccttgatagcattttaaaaagagaagtaccccagtaagatgggaaatgaatacaagatgaagtaatgagatatgcaaggtaaaggggagaaacgtatcttacaaaagtatattgttacctaaattagcaatccctcctcctgaaaaatttatatatcatagataattcagaaatataacccgaaaccagaagcatggtagggaagaggagtgggaaactgttagtaggaaagtctagagggtgatgggagtatgccaatgcacttgttctgtttaaggaagagttattaagcttaaaatgctgttaagcttaagaagttgacaagggaaagaataaacataagtaagggtcataataagttagggtcaacaatgagaaaagtatacatagaatgtattatattctaaaaaacaaatttaacatagtcaatggaaagtataaaatccaaacatttcaatggaagaaaacaattttgaattatcccaaagaggatggaaagcagtaaaaagaaagtacagtaaatagaaaacacaaaacgagacagcagaaataagttccaagataacattaattaacataaatataggttaattcaacccagaaatcaaaataaagagactctgattgaatataaaaacaaaatccaataaaatactgttagcaaaagataatttatgcaaagttggaaagtaaaaggttaaaaaaatctaggcacattaaaaaaagaaagaactccaaggtagcaattttaacatcagaagaaaaattaatttagggcaaaaataacatacaggacaaatagagatgttatatactaacaagggataataaatcaagaagaaataacaatcataaacacatatgcatccaacaatgtagcctcaaaatgtatactggggaaatagatatatgaacaattatatgcagagattttagcacagctctttcagaatatgaatcaagaaggccaaagataagcaagatagaatatttgaataatatatttaataattttgaactaaaacatacacacacaaacatatgcttttatacttaacaaaggaaatatccatcaattacaaaaaatgaattatgaggaaattacatcctccaattatagtgaagtaaagttagaattcattataaaacgggcacttaaaaatatcacatttctgggaagaattaatattaactttgggctaaagaggaaatgacaagggaaattatgaaatacttagaaccaaattataatgtcaaagtgtgtgctgaatcacaatgtcaacatttatactaaagcagtacataaaagaatttaaaatttatgactatgcttattagaaaataaaaaatactcagaacaaaaaggtaagtgtgtaactcaagaagttaaaaaaaagagcaatggagtgaacccacagaaatgagaatgaaggaactaataaggatcatggaagaaataaaaagagagagcaaagacaatggatgaaattagctaaaccaaaactagccttttttctggggggttggggggagaacagtaaacacaaacctctgataagagtaactaagcaaaaaggactgtgttcaactgagtatagcactttcttgctcatgcttttcacctcatggttgcaagatggctgtttctcctctaaggaaagggaagaggaggaggtagaggctacatctggaaagcagaaatctttaccagacatccttcgcagaatttctgataaggtgaacattttaaggtgcagagtctggtaaggtgaacattttacttgaacacaattgctgccagggacataatgtgggtaaagaagaggggaaatggatattaggtaggcaagcaacagtctcaagaactatacactaatacatttgaaaacttgggtagaaaaggataaatttccagaaaatgtaaaatgtcatacgaagaaatagaaaattacataaacatttgtatataaagttttcttgaatacaagaaaagtggctctactgaactccaggcaccaagttttaccatatgttgaacagagaagccttatgttatacaagttgttccataaaatagaaaatagaaaaaggagggaaagctgcttgatttattttatgaggctagtataatcataatgagaaaacaggttaaggaaagtgaaagaaaagaaaacagagtgaatattaatgcaaaaaattttaaataaaatattggctaccccaatccaacggtgtattttttaaatcctaatttatgaggatcaagttaga[137 bp omitted]catggtgaatcctcatttctactaaaaatgcaaaaaattagccgggcatggtggtgcgcgcctgtaatcccagctacttgagaggctgaggcaggagaattgcttgaacctgggaggcagaggttgcagtgagccgagatcgtgccattgtactccagcctgggcaacaagagcaaaactctgtctcaaaaaaaaaaaaaaaatcagaaagtatattaatatacaatcaccacaggaataaactagagaaggaagaaaaccacatgatcttaatagatccagtaaatgcttaataaagtttatgatgagtgttatgaaaaaccaggaataaaaaggaacttctttaatttaataaagccttcagcaaacatcatactgaagctttagatgtagcctggcatggtgcttttaatccgagcactttgggaggctgaggcaggaggattgcttgatgccaggaatttctacaaaaattaaacaataaaaacattagctggtcatggtggcacctatagttccagctacttggaagactcgggtgggaggatcacttgagcttgggagttcaagacgccatgagctatgatcatgtcattgcactcctgcctaggcaacagagtgagaccctgtctctaaaaatcaaatacacaaacaaacagacaaagactttagacagattctttttaaggttgagaacacaaaaatggttactctaccactactattcaacatggcattggaattccttgctaacacaccaagaccatgaaaaccaccaccactgccaccaccaataacaacaagagggtcaagtgctagcagggtaaaggcaaaattgattatttgcagatgaaatgtttatttacatagtaagcacaacagaattaagagatagagagtcagaactaaaaacagagttcagcaagatggctggagatgatgcccagcatacagaaactgatagggtttgtttgcactgtcaatgaccaattagaaaatataaaaatatacaaaatgatcttttacaatagcataaaaaactgtcaagtacttacgaccttatataatgaaactacataagatctttgtggag[137 bp omitted]ggtgaaaccccatctctactacaaatacaaaaaattagccgggcgtggtggcaggtgcctgtagtcccagctactctagaggctgaggcaggagaatggcttgaacccgggaggtggagcttgcagtgagccaagatggcgccactgcactccagcctgggtgacagagcgagactccgtctcaaaaaagaaaataataataataataataataataaatagaaatacatactatattcatagataaatggcttaacaatgtaaggatgccaaatccctccaaattaatgtacgaattcaatgcagttccaataaaatttccagaatttttttgggggaaagtgaaacacttactgtaaaatttataagggagaataaagcctaaaaaagaagagtaaagaggaaagactcaccttaccaaatattgagacattacaaagccaagtgctaactgtgatattagtgtgatattagtgcagggacaaatagattaataaaactagagaactcaaaagcagacttaagtataaagatgtagtgccagaaatcatagaggaagagtggattatttagtctatagcattttgaaaactggctaagtggagaaatataaaggtgggtccctatcttaagtctattcaaaagaaattccaaatgaattaaagacctaaaatgagagtttaaaattaaaagctaatatggaaaatgtagtatctttttaacttggaagtggggggggtagcaagagagattcttattttattttatttttctccctagaatccttgtagcaagagagattcttaagatcctcaagataaattgtaatgggaaaataaaaaactttgattacatcaaaataagattttctgttcaaaaaaatataccaaagttaacaaatgagtgacagactgggcaaagatatttccgaaatgaaaatcagcaaaggattaatatctagattatacaacacacttctgcaaaaccacatgaaaaaagacaagaaacagaacaaaaactgggcaaaggatattgtggaaatatgagttttaagcttcaaacactttgatttgactttggttaaaattgagttggaaccaaaggtcacgatcacaactagaaaaccctcagaggttaacacttttgaaaatgcagaacttttagtttgtggtctggcatgttaagaaacttggaagtaaccactctgtcctaacaagtaaaaagctgaaaaaactggaaaatcaacaactcttcttagatctgtgagacaagtgatgtcacaggataaaccagtgctcccaagattggagagacagagaggtgaatacagagaatcaaaacatacggaagcagaaactcacaagtagaaaccggcattgtacttgatgagttgctggaggctcggcatggacaagtctgagagataaatattccaggggtacccaggcataagggggtccctacactctggtgaattttacctcctggagctctaccaggttctcacagtgaataatttgagaaaatttccctcatgcttccatcctggggatgggaaaagaagctatttggaaataccaatgcattccattcttttcaacaaagccttcctctaggagaaactatttaaccagtctaacctgctgggtttttatcagagcgtaattaacttaggggaaggaaaatatccaattccaaccagctgtagcttccacatggaggaagggaaatactcaactctaatttcctccaaccttccatgtgggagaaggaaaaccctaattccagttcactctaaccatcctagtttacctaaggggagaggggagcaactgagaagcacgtctgaagttcacagtctaggggcataggcttactaaaagactgaggcctactcataggactatagaatgctcttcttcccccacaccttaccaccacattactaaaggcttatgaacagaagtttcttttacccagtacattatgtctggggaaaacaaattacagggcatactaaaaggcaaaaacaaaatatagagacagagaaagcatcagaatctgactcatgtgacagggatgttggaattatcagatcaggaatttaacccaaatataattaatatgctaagcgttctaatggataaagcagataacatgcaagaacagatgggcaatttaaacaaagagatagaaattctaagacagaaccaaaaacatacactagggatcaaaaacactgtaatagaaataaagaccacccagataggctcattagtatactggacacagctgaggaaagaaacgctgagcttgaggatatctcaaaagaaacttccaaaactgaaaagcaaagtgcaaggccgggtgcggtggctcacgcctgtagtcccagcactttgggaggctgaggtgggtggatcacgaggtcaggagttccagaccagcctggccaagatggtgaaaccctgtctctactaaaaatacaaaaattagctgggcgtgctggcaggtgcctgtaatcacagctacttgggaggcttgaggcaggagaatcatttgaacccgggcagcagaggttgcagtgagccaagattgcaccactgcactccagcctgggtgaaagagcgagaccgcatctcaaaaaaaaaaaaaaaaaaaaaaagcaaagtgcaaagagactaaaaaagaaaaaccaaacagagcatcctaggactgtgggatagctacaaaagctattcatataaatacatgtaatgagaatacaggagaagaaaaaaagaaaagaacagaggaaacatttgaaaccttttaaaggctgaatgatattcctttgtatgtatataccacactttttatccattcatctgttgataggcacttgggttacttccacattttggctactgtgaataatcctgctatgaacatgcatgtacaaatatctcttcaagaccttgccttccattcttttgggtatatattcaggaatgggaatgctagatcatatggtaattctatttttaattttttttagcaagaaccctacagttttctatagtggttgcactattttactttcccatcaacagttcatagtgttctaatttctccatccttgtcaacacttattattattattattattttttgagacacagtttcattccgtcacccaggctggagtgcagtggtccaatctctgctcactgcaaactctgcctcctaggttcaagtgattctgctgcctcagcctcctgagtagctgggattacaggtgtgtgccaccaggcccagctaatttttgtattattagtaaagactgggtttcaccatgttggccaggtgaactcctgacctcaagggatcagcccaacttggcctcccaaagtgctgggattacaagccagccacagtgcctggcctgttttttttttgttgttgttgttcgttttttgtttgtttttcatagcagccatcctaatgagtgtgagagatggtatctcattgtggttttggtttgcatgtccctaatgattagtgatgttgggcatcttttcatgagcttgctggtcttttgtatattttctttagagaaatgtctatttaagtactttgcccatttaaaaatcaggttgtttgtttttttgttgttgagttttaagagttcttcatatattctgcatattaacaccttatcagatgtatgatttgctaatattttctcccattccataggttgcctcttcacttctgttgattttgtcctttgatgctagacctttgtcatccacatctttgtcatccacatctgaaccccatctctcgtttccattggtggtagtcgtggtggtggtgggcctcagtatgactgcagtaatggtacctggtgcgtcttctttccaagactgcccttacttagtttcttttgtttgcaatgagacaaagatttctgagcaccaaatgacaaagaagagttaagtttttaaaagcaattgttttcttcttgaaatgtttctttagttcctgttcaagacaatgctaagcaaaattcagatatcaccacacaacctctggtcttctgtggaaggcaagacttcttcaaatatccaaacaccttgagcccctgagttggtctgactcgctagtcccagggacagacacagtgaggtttatttgctgctgacagccaagctccaaggcaagatgggacagctattgtcatggggggagacattcagatccctcttatgacttgccataaaaatgatgggcctctggtgggatccattcccaactctcttacctcatttcaggtaggttcagtggtgacatccaatcatagctctcttacctaactcacctctccaagggcaagcttctcactattctctaatcaaaatttagaaaacctgccagtacaaccttggagaagaggggctttagccaaaagcaggtgctatattctctccttcctggaagtgtcatctcttttctgggctaagagcacacagattttgatgtaatttgccaagaacaataggaagaagcactgtttctggatgccacatgcttcctgaaagaggaaaattgtaacatgttgatatgatagtggagggtcttggaattttcttggaatcttctcatctcttccatggtgacagagatccagtgagtgcctggtgagataggacttatttgtaaatccttgtgagcctctctctgcaggcactggaatatacactgatgagatttgggcagccaggcttggaaggggatggggctgaggagcaggaggtgagggtctgtgaaattggttttattattgtgactctgacctcaggtggtccctcggcagccctaggaaactcaaaaagtacatgcagctatttatcctgtttcttcacatttacactgatcaagacaaaagtagcatcagggtcgtccatatcctcaggaaaggctgccagaggctgtctgggctggccaggctgatctgccaattccactggaagcctttgcagctgctcccttttcccagaccctggcctcgcctcctgtctctcacaaagccagctcagcagcagcacctgatcctcggggttttctgtaattccaagctccaagaactaaagggccttcaggttgccggcctcatcctgagctgcagctttgggaagggaatagggaccaggtttgcccaatgaagagggacgctagttttcccttgtgtttggcgctccctggtggagagcttcggaacccctggtcgaatcctctcccttcctgtcccggtttgctttcagaagtcctcttcagtccccgcttacagccattccacccccgtgtggaggcagaaaatagctttccagtcccaagagcgtggcctgccccttgcaaagggcagaggggatgcaagtgtccaaaactgcagcctatgggggtcgacatgaacaaagctaaagggaacgttgagtgccaataggaaggtgccccgccctgaaggtgcctacccagacctctgccttccgcagtagccccccatgctgcaggcctcgaccagacaccaagttccagtcaccacagattgccccctctggctcatcccaccactccctagaccctggctttgagggcagatcgattggcctatagggctggtgtcttggctcaatgtggtccttctgcacacagaccaggaactttctgccaggttctggggaaggagatgaaccttcattccaggccccagcatctctcgggttccagaatgctatgctattctgcagggtgagaagggctggtgtgcccttggcccaaaggagggaatcacgtcaaggccgagaggcacaaacttagaaggtcacagagaccaaggccctcatttttcagacatgggagctgagacccagtggggtaagtgacttgcccaggggtcatattttaagttttacttctgtagcagatgacaactgtcttagtccgttttctgttgcttataatggaatacctgaaactgggtaatttagaaagaaaaggaatttagttcttaaagttacggaggctgagaagtccaaggtgaaggggccacatctggtgagggccttcaggctgaggactctctgcagagtcccgaagtgttgcagggcctcacgtggcgagggggctaggcatgctagctcaggtctctctctttataaagccacctgccccactcctataataacccattaattcattaacccattcacttatccatgatggcagcatcctcatgaaccattcacctcttaaaggtcccacctctcaatactgtcacatagaggattaaatttcaacatgagttttggaggggacaaatattcaaaccacagcaacacctcaccagtcacgtttctgtcgtgcaccgcaggctcccaggattggaaagaacttcagtccagtggagcctcatgtctccaagccatttcacagccaggctagcaaaaagataaaggtttcatgaacatggctgtggaaagccagtggatgctgagcatgccttctgctttgctccacatcacaaacatcaccaagtggcagggcttctggtctcagtgacagtcagcaattgtagaaggaagctagcagatgaggagtttttgctgtattgtctataattctttttttttttctttgagaaggagtctcgctctgtcgcccaggctgccaggctggagtgcagtggcgcgatctcagctcactgcaagctccgcctcccgggttcacgccattctcctgcctcagcctcctgagtagctgggactacaggcacccgccaccacgcctggttaattgtgtgtgtgtgtgtgtgtgtgtgtatttttagtagagacagggtttcactgtgttagccaggatgctctccatctcctgacctcatgatccgccggccttggcctcccaaagtgctgggattgcaggcgtgagccaccgcacccggcctgtattgtctataattcttatgatctgagctttggtttcaggttttggatggatggcttcatgggctcccgggctctgccatttctgcagaatttcctcctcatcacatgggttcaaaattacaaaatcatccacgatccttgatactccttcttcgttgatccccgcggccccattatccaataaacaaccaagggctgtcttgttgattccacttttgaaattccaatacacatactatgttgtcatttgattctcataccttttgggatgcagcctcttcttgcctggaatgttgtggtggtctgtccaaaacaaatgtctcagcacccataatctccaccaactcagactcattgttcacttcgcaacaggcaagagttaaaagctttcagtcctctccattggctagtcaaatcttctcttctagaggccccatagtcttcagaggaacaaccgtggatttctagcagccagatatgggttcaaaccatggctctaccatctaatagtcgcaaccatgggcaactaagtcagttgacctttctgagccttggtttcccctactgtaaattgagattagtatgaggattatgagtattgctgtgtgcaggtgtgaggcataaagagcagaagcaaatttcaaccagtgtgagttctgtttcccttagattgaggcttaggaagttcacaatctgttccaacacttctttccaactttattttccatgaatctcctgtgaaatctacacgcgtatctggtgtgttatctctattgtgcccctatccctgatcattgctcccctgctaggaagagcctcttcacttgcctgagttggttgaatgtagcagttgggaggacggactctgtggtcagatagatctagtttcgaattttaacctttctgaaccttagtcaagtcacctgtacaatgaggccatactaatatcttatttcataaatttgatggtctgacttaatgagataagctttgtccacctcttattagcccgacgcacaagattcctgctagtctgggtgtgggagcccagatttgtccctggcatcaactctattgggttgaaaagatcatccagaaaactacaaatggcatttttcaaagggtcttctagggaacactagttctgaaagatcgtgattagtgttacatgcgaagaaggctgtgacaccacataaggggaattataggtcaaagagagagaaacaagtttgttgactgcaggcttttgagagtctttaattgctaacaggtattgcaagtttctaaaaggtgacaataattaacatcattttccaaagttgtttgaccacagacagaatccttatgtaatgctctccccaaccctccacaccactaggattgcatgttctgcaaaactcagttgggaaatagtggtctaagtaaacctgagcatgatggttaatggctcattcaatatttacattcctcttagctggaaccaagacatgtcagagggtcaaactcaatatctttaacagctacaagatcaggagctgagaattgtatttacttttgattctgtaaagcttaactgacctactggtaaagtaggtaatagagtgaaagtcacagcttgaagtctaagactttacgacccagtccttcctccatacgccggcttatttcataaactccatgagggtcttttcagaaggtccctgcgctcagctgtcctgtctgcccagagagaaatgctcactatttaaacttctcacttgacatttacgttgtcctgtcccattctgtttgtggacatggttttgtggttcggcctttccttctaaattgtcagtattgttcccaggcaggctttgtcatagaaacaaagtgcagttcaaggtttcacatctgcacaaataggcagggtgggtagcatcggcctcatatccaagggagagagtccgttgagtgttactccgatcggacggggggggtagttcacatgtgcatccccaaacaatgattgcggccctgtgaacaaaatgtgcagaatggcataaagccattgggaggtgacattaattaccccgggaagatgtgggaggcatctggtgacgttatgcaggagggagtggtagacgcgttcctaaagactcacccagcaccctgaaggatcacagccttgctcagtacatacttatgaaggaagggtgacctgaagaacgcttgagcccagggccttcactctgaacttacttccctctatcacagcctctgactctgcaacacctcaccccagggtgccgccagcataaagacagaagcctgcagggctcaacaaggagaaggggcaaagtgaagagaattcgggaagctcgtgacagcaaaatcacaggtcatggagtaaagggaagacgaaattagaaaggaggtttcctaatttgggacattgggaagatatctggcagaaaatctgcctcaagcaggttcatctgtttaattaacctgaggccagtgactgttttgttgttgttgttgttttatccatgaaatgtgaccagcatgaaaaatctgatatgcatatttcagaggacagcccctgtgacattcgtcagcttattaaaggaaacaatatgccctaaaacgtgaaaagccacttccttgaaaccaagtcgagggggaatggtaaaccaaagttagcagaaatagaaaagtagggtgttggtcaggaaagacttcctatagagatgtgcctgtcagaaagattactattcccatcccgcatgctggagacccatgtggcaaacagtgtggcagggacagactttgtttaaacgaaggaatttgcactgaagatcatcttccgcatttttataaactttgaaagcagtcagtggtctcagcattttcctacaaaggccatatccccacgcgtacatttgaattctcaaaagctctttctccaaaagcattgctaataaaaaatgtaaaaaaaaagaattgtcaaaggggcctctagagatcatttgacttggttcaatatctttaggcttgtgagtatgtaaaactatccaagacacaaagttatcaagtctttttgttttgttctgttttttttttcctcccattaaagcattctagaaacaaagaccactgctctgaagcatttactattctgataggtaatgtgctcttatagtcacctgaggctgttgttattcttgtgtacttctatgctgctgattaattttcaaaagcacggtacagagaaagggtgctcaacattactagttattagggacatgagaattaaaatcacagtgagatacagtctgtcctctgtatctgtgggctccgtacctgctgattcaaccaaccatggatcaaaaataatccaaacaacaacaaaaataatacagatgcaaaagtagggaataacaactacttacatagcatttacattatattaggtattttaaataatctagaaatgatttaaagtatataagatgatgtgcataagttatatgcaaatactatgccattatatagaagggacttgagcatccttggatttggtatctgtaggaggtggtcttggaaccaattccccaaggataccaagaaacaactctactactacatgcctgttagaacggttaaaattaaagagattgattttactgagtgttggtgagggtgtagagaagctggaactctcatgccctgctggtgggaatgtaaaatggcacaaccactttgggaaactattagcagttctttaaaagttaaacatatgtctaccatatgatttggtcaatccactccttggtatttacccaagagaaatgaaagcgtgtgttcacacaaagacttagatatgaatattcataaaagttttatttgtaatcatcaaaaactgaaagcaattacatgtttggaattgaaatgtatggtaatataatacaatataaatgaatggataaatcgtggtatatccatgcaatggaatactactcagcaatgaaaaggaagaaactattaatgcacttaagatcattgctgattttcaaattaattatcctgtgtaataaagaatttggcctttgtccccagttcctgggagataggctctaaatccttggaattttccaagtcgaagagtgtcttttttactggtggttggcctgtcaaccacacttgagtttatgctaatgaggtgactcatgatgggaccttacacaatttatgctaatggaatgactcaagatgggggctggccatgccagaaaaaccaaccatgtatttagaaggttggggctttgagcttttgatataggcctgacttctggggagaggagcagggctgaagattgagtcataggccagtgatccaatgagtcatgcctatgtgatgaagcccctaataaaaacaatggatatcaaagctcgggtgagtctgactgcttggctacgctcagtgtcttgtctcacatcagtgtgctggaagggtcctttgtcctgactccacaaggagaagacatggaagcttcatgtttgggacactcccagtccttgccctgtgcatctcttcttttggctggttctgattttgaaaactttggctacaataaaactgtaataataagtgtagttctttcgtgggtcttgtggggttttctagtgaattaccaaacctgagaggggagtgggaagcccccaaaattgtgactgcatctgaagtgggagcagtcttgagcccttaaccttgagcctagctcctggtagttgttgtcagaagtcattgcaattatgctgagtaaaaaaagtcagaataaaagaggacatactatagtctttaaaaatgcaaattaacacacagtgacagaaagtagatcagtggttgcccgggaccaaaatggagcacgctacggaggagggattataaagggcaggaggcatttcaccggtgtttgaatatgtgcagtttattatatgttaatacctcaataaagctacttaaaaaaaaaaagctcagtgtggcctcttatgaccctgaccagagccctccatggcttatccaaagtctacaggatcaaggcctttcatgacctggtcccatctgtctttccagccttgcatttaagcaccatcctacacaaatccttcgctttagccaaactgtatgtcttgctaccctccaagtattcttcatgctttttccacctctgcagctttgtttatatagtcatagaatgccctctcctaggttaccaccct[213 bp omitted]gaggcaggagaatggcgtgaacccgggaggcggagcttgcagtgagccaagattgtgccactgcactccagcctgggcgacaaagcaagactccatctcagaaaaaaaataaataaataaaacaaaagtaaaaataaataaataaataaactttacctatccttgaagacttagacttaaatataatctccacaaaaccttatttgagttattgagtcagaaatgttctctttcttaaactctagtaatactttttctgcagcatctcccacactgtcctgtgcttccgtgtgtgtgtgtgtgttgtgtgtgtgtttgtgtgtttgtgtgtgtgtgtaagtaaatcttctagttagactgttagcttcttgagggtgtggactgtgcattttattcatccttgaattccccatggcaagtagcacaactttttttttcccctttggaaaaaggggcttcatacattaaagaaaacataaagtcaaacattaactaaatagcccaaatgaacatcttggcctcccatccttcccttaaaatcttttagatccatcaatcatcacctccctcagtcttcggtcttgtcctgtacaccccctccccccaactcacgcttctttttctcttccttcttcctcttgttcaggctagatcacacttacttaactcttttcttaagccagttcctgttcctcatccttttgtttaagaggacatacatgtgtttgctttttggtattattgtatgttctgttgaaatagtaaatattatctactatccagtcaatttcaagtgatggctaccttagatcttaatatttaatcccccccctctttcccctcaatttctccagcatagagcacagtgattaaaatctcaggcccaggaaccaccaggctggatctgaataccaactctgccacttactagctgcgtgacctcaggcaagttactgaaccttcggttctgccatctgaaactggagatgctaatggtgactacgtcctatgattacttgatgagctagtacgcgtacaccacgtaccttgtttagaacagtgcctggcctagagtgaccactcaatagttgttatttgtttcactgcaaatggaaacatttggcaaagaactgttgagacaaatagagctggaaaggacaaccgagtaaacagtgcttggttaaccacatcagaatcactcggagattgctccaaaaatgcagattactgagccccacctgtgagattctggtggaacccaggaacctggctttttgcaaatgctcctcctacttggatcgacagccagactaccggcacagaagaaaatgccccaaatttggagtaaggaaatccaggactctggtagtatttctgccagtgacccagtgtgtgacttctgagactacactttctcatttgtaaaatgcagataacaaatttgatttattcatagagtagttgtgggggtcacattactaaagtcatttctgtcggggaagctggcttagtggggtgaaaggaatgcaggctttgcaataagctggacccggctgtgagttccatcgtggaggccgctgcagatgtcgttagttgccaattctatatccagccccctcttcctaacgcaaccctgattttgcttggtgtgtaactgtgcctagttgaaaatacttcctcccagacttccttgcagctgggtggccatgtgacacggttctctctgctgaggagtttctgggaaggcttatctttcctttttcttgtttgtttgtttgtttgtttgtttggaaacagggtcttgctctgtaacccaggctggagtgcattggcacaaacaactcactgcagtcttaaactcctgggctcaagctatcctcccacctcagcctcatgagtagctgagactacagatgcacaccccatacctggctaattattatttttttttaagagacaaggtctcaccatgtttcccaggctggtctccaactcctgggctcaagcaatcctcctgcctcggcctcccaaagtgctgggattataggcgtgagccacccaccgtgcagcctattttcttgatacagacacttgttcctgtttctccctttgccctattgtcttccccttttcttactgcctggaacatggatgaaaggcttggcagagcagcagccatcttgttcctatgagggtacaaatctgggagggtagcttacaggctgagtatgacagtgtgaggagatgaaaagattctagatccctagtggcatcatccagcagtggcagcatctctgggctgcccacccctaaatgttttatatatatatgagacaaatctctattgtttagggtggaggtaatttttttgttgattatttgtaccttaaacttcttagggagaattaaaaaacaaataaagggccaggtgcagtggctcacgcctataatcccagcactttgggaggctgaggcgggcagatcacgaggtcaggaaatcgagaccatcctggtcgacatggtgaaacctcatctttactaaaaacacacacacacaaaaaatagctgggtgtggtggtgcacgcctgtaatcccagctacttggcaggctgaggcaggagaatcgcttgaaccagggacttggaggttgcagtgagccgagatggcgccactgcactccagcctggcgacagagtgagactctgtctcaaaacaaaacaaaacaaaacaaaaaaacaaacaacaacaacaacaaataaagatcctagaaccatgtctgacccagtggacattcatatatctgcttccccttctccagctgtgagacgttttctgcatttgtgcagtgaggcttcttctaaattcaatatcctatgtttaactaatgataaggtcgaagaattgggccctgggactggcctctgaaataaatggccctttattccaggcccttcccctgggggagtttgggaaggcagaagcactagtttgtcactcccaaaaccccaccaagtgcctgggcacaggtacagcatggagaacctatagcaccctgacctatggagatgtctgcaccccaataaaacagatgttaaaatctccatgtgctttgtgaggcagagcatgcaaaatgtgagttcaaaagacatgaaattgcccctgctctgatgtaaatatagatgatgattctaagtgggacacacatgtgtgagaaggtaagaatgaaacctattaacctcccacttcccccccaacacacatacatttcccattattttctcctgttggaagtacttgggtgtgagtgtgggcacctgtataccagtgggaacagaaaggagtttgttttcattaccatcctttttttgagatggagtcttgctctgtcaccaggctggagtgcagtggcatgatctcagctcactgcaacctccacctccagggttcaagtgattctctttcctcaacctcctgagtagctgggactacaggtgcgcgccaccacgcccagctaatttttgtgtctttagtagagacggggtttcaccatgttggccaggatggtctcgatcttttgacctcatgatccacccgcctcgtcctcccaaagtgctgggattacaggcatgacccaccacgcccggtcctccattaccattcttacctgcccacagcatggctttcacagaagcaggctaatgcctttatgacccctgggaatgccatgattcatccaagtcagctgccctctctgccaactgaatcctgcaggtccccatggtcttcctggcactgacagtttgatttgatcgcttcagccattgctgaattcaacagcacctgagtcaggacttttgcaaaccttaaacgtaaacatatagtgactatagagggaactttttaaaaagcaaatgtattcttcctccattatctaaaaaagattggcaaaaagttaaatctccttttacttcaaaagtaaagaaaatcatgcaatgagatgatcctgttgggccttcagcacagacccatcctctcttccccggctcccagcagtccagggcaggtttctgtcctcagcaggctgagttttgttcagtccattcgttccttgctggatcagcacactctggatttctcagccctttcagtctgagtgttcctccctcatggccttcacaagccagtcctgttctgtcccctgctcagagtcactggtgtcactcacctccatggacagcagcttcgagtacttgattttccgctctcggggcagcctccgctgtatggacaggagcaaggccaaccagagcaacagggccacacagcaggcctggtagagcacagccaggctgaagcgcatcaccacgaagcccccgacaaagctgcccaggctacagccactcccgtaaaagtggcctcggaacaaggcactcagagccctctccatgcggggagtggccaggtcctctactgaggcccccacagcccaccacaaagctctgttgctaatggcactcaagatctgaatggggaggacggaccaccagctccagaggaaagagtagtacagcagctgcccagcgaggcagctcagccccagccccaccaggcccgtcctggacagtttcctaagcaatgtagctttgaacggatgaagcagaatttcccccagcaagctgagggcgaccgagaaacccatgaccagctcgccgctcccatggtccttcatgtgccagaacagaaagttctggacagtactgacgatggctcctaccaaaacagtggtggaggcgaggagaatgaggtgggggtcaccccccacaatggacagtgctttgacccttttgtagctgggctcccactgctgacagatgggaatgggaaaggcaatgctcaccagtaaggccagggtgctgaccaccgagtacccatagaagtggaccacacctcgggggccactggtcatcaggaagcagtccagctgccccaccaaggctgtgatgccacacacgcctgccgacatgcccagcaacctccagacccacaggcttctgtatcggtcagtggcatccacaaaatccaggaactcataaaggctgtcatctgccacctgctccagaggcgctgtcagcagctcccagaacgccacggaccccaaggagaggataaaagtccgccgcaacgcctccaaggacaggtcaaaagcccaggctttccccttggtccctgacaaattggctggattcccgggccctttccccccaggaagcaaggggagggctgtcttgaccacctcaaaagtaacttcccagggatgatctttcagccccgaagtgacaggatggaggagagcttgggatgtggtcctagctccttcaacggagggcgctaagtagacgtgcagatcacggaaagtttctcggtcactttcaccaggtgggtttctgaagccaggcatttccacctctgcagtcctcttggctgggtggctggaggcagactcttgggccgaggtgatgttcacaggtagcgtgacccccgggagtgcgtctgtgctggtcaggccgctgcttccattacaagggaagtgcacccgatttttgtctaccggtgggaccaggaccatcagcaggctggcccccaccgagccgagcagggagccgatcagaagcgctctccttttccggtagcttttggccaggaaggcacagacgggagcccagaaggcagcgattaggtgcttggttcccattagggtgcccacccagggcgcggccaagcccagctgcctcaggtaaagggtcaggaacggggtcacgcaggcttcccgcaccccgcacaccaggtggaagagcttggccacccccagcgccctgctgatgtcccaccgggggttggcactcatggctgccgggctctgtcaggcctgggccgacggagggcggagctgggcgcagggcgggcgcggccccaggtacccgggagggaggcttgggggaccggggctcggagcgagtgggactgcgcccccggtctggggcggcgccgcggtcaccaggtcaacggccgcccccggccacagcccccaggtcctgccgttggaccgaaaggggccccgcccggagggagaggcggggcgggggcgaaggtgggggcggggccagcgcacctgcgagccgcacctgccacgtcccaccgcctccgcgggccacctgcccggacgtgcgcaggtgcgctaggggcgcgtccgggggcctgtagggtgcgctctgagctaggcctcgggccccgcctggcctctggctgccaatgtggcccaggagcctgagctaaacgcctggactgcttcaggcaagtaaaaccgtcagagtcggcgtgggggggagccagaatggaatgaatggtatccaccaggctgtctccctcatcttcttcaggtctgtactggaatgcaccctgatcagtgaccaaccacagacagagatcaacacggtccactctgacatcgcaaatcccatacccctgtacccaccccgcccccaagactcccactcccctgccctacttgatcgttctctctagaacttatcactgaccaaggcactacgggcttatatttcatgtgttgactttgtttattgtctgtctccaccagaatccaagctccaggaaggcaggtatttttgtccccggggcctagaattgtttcattggatgcatactgccctcggaaatggcatgaccttgggtgacatggttgtctccagctgggacagtccctaaggagggctgacagctgatggcagtcgtccaggggaactccttgcagccgatcgccagcacatggcagtccccagagccatatgtatgtgctgcacagttttaacctacacctaagggtggtctggtgccctgtttgagagtacacacacttgaggtggttagctagcatttcatcaaaaagacagagacagctagtacaagcacgtcgacaatcttaaatcaacagaagtgtcttcactaatggacataatagatattagaaatagtttttcactggtgaaattagtggtgtccaagccacctggattggagataatttttttgaaggcatttcctctct[133 bp omitted]aaccctgtctctactaaaaatacaaaaaaattagttggttgtggtggtgtgtgcctgtagtcccagctccttgggaggctgaggcaggagaatggcatgaacccgggaggtggagcttgcagtgagccgagatcacgccactgcactccatcctgggcaacagagtgggactccgtctcaaaaaaaaaaaaaaaaaatctagagatgccagtagtccaaaccctttggaaggatgctataggctttgcttcaaaatggtccagtgtgcagctcctgattcagtaaacttttcatacaaggtttgctcagagcacctaatttggctgggggtggagtggaactgcttgccaacacatgtctatgtgtaagggaattcggcctatgacttgcctgcattgtcagctggtagagagtatgttggggagcaggcccaggggcctcacttaacctaaaaaactggtaaactctgcagacatctactgaaaacctaatgattggtgatgaaattggtatgaatccgtttatatcataccaatggcaggaaaaataaaatctagtctcctccaggtaaactcactcaaattcagtgctactgcaatcatttcaggtttaaaaccacctcagtcacactaatgattgccctactcctgcccctccctgggttcttctgtgggcagcctcagtggaggatagcgcatccatccacttctcagtcctgacctgtcctgggttcatctccactgggaggcagatgtcagactccaatgtgcctggacatgtgcaggtgtgcgaggggcatgtcctggggcctgcagggtgcacctggagctagaccaagggccccgcccagcctctggctgcccatgttgcccaggaacttgggctaaacacctggattgcttcaggcaagtaaaaccatcagtcagggtgggggcagtgagaatggagtgaatggcatcctccaggctccctccctcactgcaccatgctggagtctgtggaggtgcctacaattctgcacctggccttcaggtgccatgctccacactgctgcctgcagctgcaccattttccctttgagcttgcctgctttcagccacccgagaaaatctccgcctgcttcccatgtcctgtacaagcacagggaatctctctaagactgaccttggacccctctggctctgcaccccaggtggtccatcttacactccccttggcattgagaaggtatcctgccattgagacttgcttccactcctggggcaatttggcccaaagcaaggcgccctcttctctattcttggattcccaaacttaaaagggaatcttctacaggtgataggactcaagtccaagcatttttgttttctctgttactctccccccacaccatacctatttctggggatgaagaaactgaagatgtgtcattgatctttctattttacacttggatgtaagtttttga[133 bp omitted]gcaacttaggaagacctcatctctacaaaaaaaaaaaaaaaaaaaaaaaaaaaagccccaaaacggccgggtgcagtggctcatgcctgtaatcccagctctttgggaggctgaggcgggcagatcacctgaggtcaggagtttgagaccaacctggccaacatggtgaaaccctgtctctactaaaagtacaaaaattagcagggcgtggtggtgcatgctggtaatcctagctacttgggaggctgaggcagggagaatcgcttaagcccgggaggtggaggttgcagtgagctgagatcatgccattgcactccagcttgggtgacagagcaagactgtcaaaaaaaaaaaaaaaaggccccaaaacaaaaaatcccaaatgtagtagggcatggtgtcatgcacctgtggtcccagctacttgagaagctgaggtgggaggatcgcttgggcctgagagatggaggctgcagtgagctgtgattgtgccactgcactccagagcagtgacagagtaagcaaggggcaggagacagaacacactagtttatacttcacagaactcttacctggcccaagtggactcaataggttataaaaaggactgccctgatgattcctattaacatataaatattgccaggtatgagatgaaagcagaaagacttcagtgtacatttattgagtctgacatttttctctcacctgatagagacacctgcctgggctgagtgaggtgggcagtggcctgagagtgggaagggaagagacttgggagggaggtggtgctgttgctgttccttgcttccaattttcccctaggccacagggctctggccaagacagcagctttaaccctggttttaagggctggatggggagcttgggtgggagaggacagtgggagaagtgggaattgaagctaaatgaaggagtagacatttgtatgagaagctgggcttggtgtgtatgttctcaagcagcgacagcattgcctgggccatccgtagacctccatgtgggcccttcctcatcacagtccccagggtaggctccctgtgctcccaggcactcgctggctcctggtcaaggccaaagctgccgtgtggagccgggccttgctctggctgttggtgtgagtgtttggagttggtggggtagtgtatccttcctcctgggcctgctgtccctgcaggctcactggacaataccagagaatgtgttgatgggcatcagaaggggcttgggcttggctttgattgcttccacctcctgttgcccatgcaaattgagccacggtgccttggacttctgggccccagaacatggttctgggcagggagcaacctcgaatctgtgggtggagagagaccagctcaggtgacccatctgagggatcagattgcctagggcatttgaaaggcagagctgttattgtagggcctagagctgttattgtagggcatagaggaggcggctacacagaagaaagaggaagagtcaggacaagaaagaaaaacctgggcctggggttcaccgggagaggagacacttggagcaagtaactctgcgcatgcctcccttacccaaacacacctcccgaggggaagccagtaagggtcagctaactggaacacagatgccacaggtcagcctgtgtgggaggggcccgtgcctgcagaggggactggatcaggaggctgcaggctgagtgtatgcagaggcatctggggaaaatgcaatatcagctgctgccctgggtatgccattcatttgcctcgacttcctggatccaaagcatagggcagtggcctctgtccatcctcaccaaggttacctgcctggccacaggatctacctccgatgaggtgccttgagctagaggcaggagatggcaggagctggctcctgcttcagtttgtcccacgggccctggacatctagggttggcaggcccagcctcacctgaccacatccctgaaagtgcgttgatcgtccttgtccagcgacagtgtcagcagcctctggtcccggctctggatctggatattgttcgtcctgaaggtgttggtcactgtctgcagcacagagatcgcacgtgtgagtgttgcctttgctcgacaggtggccctgccaacatgccctaccctggaatctggtgtatttcttcagtccagcacatggggtccccagctctcctcctgcaagtgactgaggagtgacaaccctgcacaaactgcttctaggctgcccttgcccttggatctcacatcgttcttccagttcttttcccagcctgccgtccttgattttgaacacaaacgggaatgctgtggatagtgcttgccaggttgtcaagttacctgaactcgagtgttgatttcttcaacattttccgagcacctcctctatgacagacgtgttaatgtatatggaatttggggagtatttcaggggttttaaaagtcttgaccccggttctcagcattaaatcacatacaacattatttacctgctgcagacacagagggtctagaaagcagccaaagaccccaagctcagaccaagccgaaggaaagcacccccaggcatccttataactcctgacctgagggagcagctccagagaggtcgcctcccattgggcagagaacttggagcattgtgggttccaggtggagctttcagaggttgtggttcatcccacacacagactttgggtaatttacaaccacagaaccctggagttgccagaggcctcagagaccatctcattcaagtgttcttaaccctggctgcccataagaatcaattttcaaaaacataatgttggagattctgattcaagtggcatagaattgagcccaggtacgggcattttttaaaaagctcctgagtgtaggcagggctgagaacagccactgagttgttcagtgtcatctagcagaggcacgagcagcagcctgaactaggagttcacacgtgtccaggcatttcagctgaacttttaggggatgggggtaggccagccagaagtctgtggacaggccatggaggatccactgggaggagggtaagagcatagtctctaagccaggctgcccaggctctaatcccggttctgccacttactagctgtgtgaccttaagcatgtttcttaatctctctgtgctaccttttaggattgttgtgaagattacatgagatagtatatattaagtgcttggaacagagcccaagacactgttaagaactcttattaattataattttccaagaaggagccaagcatgactcatggactcagcaatgaagtcccaggtgtcagaggggaaggggaacctactgtgggttctttctcttcttggtttgtcccctaggccaagcccccacctatcaccccgctatgcatagactcctgtgcgtctgaatgggtgagctgtgagtaaagacagatttaacaaaacctctgtaagacggggcaactccatgacagagggtaacactcaggggagagggggcttctcccctggtgccaacagaacctgtggcaccttggccgggcgcggtggctcatgcctataatcgtagcactttgggaggccaaggtgggcagatcccctgaggtcaggagttcgagatcagcctggccaacatggtgaaaccccatctctaccaaaaatacaaaaaaattagccaggcgtagtggcgggcatctgtagtcccagctacctgagaggctgaggcaggaggatcgcttgaacccaggaggcagagattgcagtgagctgagattgcaccactgcactccagcccgggcaacagaatgagactctgtctcaaaaaaaaaaaagaaaaagagcctgtggcacctttagtgctctgtgctctggagctgtcaggcacagtgggaaggttgtggtcaggggggcaggcagtggaacctagtaggcactgactggacagctaatggaatgattgttgatactggaatgtcacttgtgaccctccaaaaatacctggagagactgcagggggctgaagtcctgcatgagctgggggagggtgggcgaaagccaggtacgttctatttgccataatgaatggaattgcacctgaactgattgcacctggtgagagagatgcatggtttccataggttaggtgactggggatcgaatgtgacccactgaagcctgcacagtggtagccatggggccagctctctgactctcaacttggtgttccttctttagcatcaggctgctctaggtgtctctggcaggatttgggcctccacgccctgcccatggacctagccccaccttctaggtaatcacacacagtctctgggcctcctcccacctgcctgcggtgtgggcagatgcctttcatttccctttgtggtctgcacacctagacacactctacctgcttggctttggcccataaggagcacaagagtcttagattttagtctataaatgaagccatgggagccagtggaaagggccagatgcagaatttgcaaaggatcccactctctgtaagactaaggaatgggcaaagtgctgctaattgtctcctgttctctgttggtggcctaacaacataccccaaagccccagttcttctgtttctgctttatttcccacttctgttctatttcaaacttccaatccagctaaggtcatatctgacccttaaacttactgagctagccacaggcccttgcccccatgccattcttcaagctgtctctgccttcttactccagctcaccatgagcttcccctcagtggttatcatccagtccatgtggacaaaacatgtatgtggacctgcctggttctgagaggaaagcacagctactggaattttcccctagcaagtccctgtagggataaaagggaacttgctgaagtgataagtttagactttcaaaaagcccctgaccaggttgtttaaagaggtcattaaaaacagaaaccactttaaggaactttgaaagaggaaatgcaacagaagggtaaataggtccactttggagcctaaaacttcaatatggggttgccctatacgaagacagatttcagctcaaggcagacctctcagccaatcagaactctcctacagtggataggctgcctcagaaagcgtcagcttccagttccggcttgagatctaggatgaggtggaaggtggattagatgactcaacaaacatccggtgaggccctgctgcaggccagacaccacaccagctaagatgaggatcctgagtctagggagtttgcaggccattgacatacaaagatcatgccatttatagtgtcacaaatgtttccatagctgtgtccccagggtcctatgggagcacagaggtggtacacttagctcacctaggtgaggggaggagggtggaggatgtggaaggaagggggaaaagcattaggaaaggcctcctgagggagatgacacctgagtctcaacttgtaggatgagtagaaattataaaaagaaggtgggcaggtggaagggaggaatgaggtttcaggtcaggcaactagcgtgagcaaaggcacagggatgtgacttcaggaacacttcccaacacatggtgggaagagcctccagggagtgcccaaagctgcagatggagaagaaggggagtgaagctatgcaacactgaagagtttttctgcccctggagaatgggagaagatggaggagttttaagtacggaataacatgggcaggaaggtggacttaaggaggatcagagtattgccggggagaccagctggaaggagatagatgaaggtcagacttggggtgaccaacttgcttgatttgcctgggactttcctggtgttagcacttaaagtcccaagtccaagaaacccctttagtcccaggcaaacagggacagttggccaaccaagctggaccagaatagagaggacaaagaagggagagatttgagaagtgttccatcgggacaaaggaaagtgaggaagaggaggcaccagggatgactcctgggtttccggcagaggtgattggttaatgatggtaccattaaacgagacaggagatataagaaggagatgaaataaaaatgactgctaacacatacataatgtttactttagccaagcactcttctaagagcttcgcatgccacaatcaatcctcataactggatgaggtaggtaatgttattatagctgtccctccatatctgcatatgtggaacctgcacatacaaaaggccaacagtaagagactttagcatccatggatttttgtatccttgggggtcccggaaataatccccatggatactgaggaatgactgcctcccctttttataaaatgatactgagtcacagagatattaacttgcttaacatcatataactggtaaatggcagaggcaagatctgaatccagacaatctggctctagagagctcttaactattagaaagtactggctttgatttttaatatcttgagtttgtggtattgtgggacatccagatcatgctaacttagttcaatgcaggagtcaaaaactcaggtatgaatgtcagggcagaagacacagatttgggaggacttaacaaatggaactaaatccttgtgagtttgatagtccaggaaatgaaaaaagaagtgagccatggatagaaattgaggacagtagctacttaaggatctaggaaaaggagttcagggaatgaggccaacaagtaatagtcaggcatgtagaagaaagtctataagaaagtgttgtctctgaatttatagattttagggtatttaaagactcagagtacagggcttcagctctagtgatggaattccattcaaaattgaccaaaggaatataaaactggggaaaacatttatgacagtgctagaagccagcttcattggagtattaacatataaacataacttcaaatatacatattttgtctaattgcctaaaaggagaatcccatcagactaacagcaggcttctcacccaaaaccttgcaagccagaagagactggggttctattttcagtcttcttaaagaaaaaaagatgccaagaattttgtatcctgctaaactaaattaataaatgaaagagaaataaagtatttaccagacaagcaaacactaaggaaatttgtcactactagacaggtcctacaagaaatgctcaaaggatttctaaacatggaaagaaaagggtgatactcattgtcataaaaacacaagaaagtataaaacatgtaggtcttataaaacaattacacaagactgcaaagcaactaggtaataattatgacaggaacaaaacctcacatatcaatactaaccttaaatgtaagggactaaatgctccacttaaaagatataggctcagctgggcacagtggctcatgcctgtaatcccagcactttgggatgcttgagttccaggcattaaagtaggaggatcacttgagtccaggaatttgagactagcctgggcaacgtagtgaaacctcttctctacaaaaaattaaaaaattagctgggcatagtggcttgcacctgtggtctcagctactcaggaggttgaagtagggggatcaataagatatgggctggtggaatggataagaaaaacaggatccaactgtatgctgcatacaagaaatctgcctaactgttaaagacatttacactctaaggggtggaaaaagatatttcacacaaatcaaaccaaaaacaagtaggagtagctatacttatatcagataaaacagagtttaaatcaacagtaaaaaaagacaaggtcatctataatgataaagggatcaattcaacaagaagacataacaattctaaataaatatgcacccaacactggagcacccagattcctaaatactactagatcaaagagatagccactgtattaatccattttcacactgctgataaagacatacctgagactgggaaatttacaaaagaaagaggtttaatggacttacagttccacatggctggggaggcctcacaatcatggaagaaggcaaaggaggagcaaagtcacgtctaacatggatggcagcaggcaaaaagagagcttgtgcagggaaactccttcttatatcaccatcagatgtcatgagacttacccactatcacgagaacagcatgggaaagacctgtccccatgattcaattacctcccaccaggcccctcccacaacatgtgggaatgcaagatcagatttgggtagggacacagccaaaccacatcattccactgctggcgcctcccaaatctcatgtcctcacatttcaaaaccaatcatgccttcccaacagtcccctgtcttaactcatttcagcatttactgaaaagtccacagtccaaagtccaaagtcttatttgagacaaggcaagtcccttctgcttatgagcctgtaaaatcaaaagcaagttagttacttcctagatacaacaggggtacaggcattgagtgaaaacagccattccaaatggaagaagttggccaaaacaaaggggctacaggccccatgcaagtctgaagtccagaaggggagtcaaatcttaaacctccaaaatgatctcctttgactccatgtctcacatccaggtcacactgttgtgagaggtgggttcccatggtcttggacagctctgcccctatggctttgcagggttctgcctccctcccagctgcttttatgggctggcgttgagtgtctgcagcttttctaggcacacgtgcaagctgtcagtggatctatcattctgggtctggaggatggtggccctcttctcacagctcctagccccagcagggactctgcatgggggctctgaccccacatttcccttctgcactgccctagcagaggttttctatgagggccttgcccctgcagcaaacttctgcctgggcattcaggcatttccatatatcctctgaaatctagatggaggttctcaaaccctaattcttgacttctgtgcacttgcaggctcaacaccacatgaaagctgccaagccttagggctcgcaccctctaaagccatggcccgagctctacattggtccctttcagccatggctggagcagctgggatgcaggacaccaagtctctaggctgcacacagcacgggtaccctgggcccagcccatgaaaccattttttcctcctaggtctcagggtctgtgatgggagaggctgctgtgaagacctctgacatgccctggagacattttccccattgtcttggggattaacatttggctcctcattgcttatgcaaatttctacagccagcctgaatttctcctcaaaaaatgggattttcttttctattgcattgtcaggttgcaaattttccaaactcttatgctctgcttcccttataaaactgaatgcctttaacagcacccaagtcacctcttgaatgcattgctgcttagaagtttcttctgccagataccctaaatcatatctctcaagttcaaagttccacaaaaatgccaccagttttgctaaaatataagagtcacctttgctccagttcccaacaagttcctcatttccatctgagaccaccttagcctggactttattgtccatatcgctatcaacattttgggcaaaaccattcaaaaagtctctaggaagttccaagctttcccattttcctgtcttcttctgagccctccaaactgttccaacctctgcctgttacccagttccaaagttgcttccacattttcaggtatcttttcagcagcaccccattctactggtaccaatttactcaatccatttcacactgctgataaagacatacctgagactgggaaatttacaaaagaaagatgtttaatggacttacagttccacatggctggggaggcctcacaatcatggcagaaggcaaggaggagcaagtcacatcttagatggatggcagcaggcaaaaagagagcttgtgcagggaaactccttcttataccaccatcagatcttgtgagacttattcactatcacaagaacagcacaggaaagacctacccccatgattcaattacctccaactgggtccctcccacaacatgtgggaattcaagatgagatttgggtgtggacacagccaaaccacatcagacaccaatagaataatagagggagactttagtactccattgatgcactagacaaattatcaaggcagaaaatcaacaaagaaactctggacttaaattggcctctagaccaaatggacctaacagacatttacagaacaatctactctacaactgcaaaatgtaattcttctcatttgcacatggaacattctcaaaaattggccatatgctagaccacaaggtgagtctcaataaattttttaaaaacctgaagtcatatcaagtaacttctcagaccacagtggaataaaactagaaatcaacaccaagaggaaccctcaaaactatttaaatacatgagaattaaataatttgctcctgaatgattgttgcatcaatgataaaattaaggcagaaataaaaaaatttttgaaatgaatgaaaatagagacacaacataccaaaacctctggagtacatcaaaagcagtgctaagagggaagtttatagtgttaaatgcctatataaaaaagatggatctcaaatcaataacctaatgttgcatgtcaaggaactagaaaaataagaacaaaccacaccctaagctagcagaagaaaataacaaagatcagagcagaactaaatggaattgggacaaaaaaatacgaaggatcaacgaaatgaaaaattggttctttgaaatgataaacaaaattgatagaccactagctaagttaaccaagaaaaaaagagagaagaatcaaataagcacaatcagaaatgagaaaggtatcattacaattgatacaacagaaatgcaaaagatcatcagagacctataagcatctctatgcacacaaacaggaaaatctagaggaaatggataaattccatttatctaggaacatacaacttccaaagattgaaccaagaggaaatagaatcttgaacacaccaataatgagtaatgaaattgaattagtaataaaaaaaactctcaattaaaaaaaacctcaggagcagatgggttcacagtggaattctacaagacatacaaggaagaactgatactaatcttactgacaccgttcaaaaaacattgagaagaagggaatcctccctaattcattctatgaagccagggtcagtcactctgataccaaagctaggcaagaacacaacaacaacaaaaaaaactatagaccaatatgcctgatgaacatagatgcaaaaatcctcaacaaagtactagcaaaccaaattcaacagtgaatcaaaaagataatgcactgcaatcaagtgagttttattccaacaatgcaaggttggttcaacatacacaaatcaataaatgtgactcaccacataaacataattaaaaacaaaaattatgcaattgtattaataaattcagaaaaagcatttcataaaatccagcatctcttcatgataaaagcccttaccaaagtagcaatagaaggaacatatctcaaaataataaaagccatatatgacaaacccacagtcaacatcacactgagtggggaaaaattgaaagcattacctctaagaactggaataaggcaaggatgcccaccgtcactactcctattcaacataacagaagtcctagttagagcagtcagaaaagagaaagaaataaaaggcatccaaattggaaaagagaaagtgaaattatcccagctccagagtgacaggcataataagcaggcttacccacccctcatccctggccccctttactcgctgaggcaggagcccagaggactcatttctggaaaaacaaaactatcctagcaaagagacttgcagatactgacatctgggatccccccacagaaagaaccatgggcttctgactgcccactgagaagccc[134 bp omitted]acctccgcctcccagattcaaatgattctcctgcctcagcctcccaagtagctgggattacaggcatgcaccaccatgcccagataatttttgtatttttagtagaggtggggtttcaccatgttggccaggctggtctcgatctcctgacctcgtgatccgccctcctctgcctcccaaagtgcttggattataggcatgagccaccgtgcccagtcaagagaccatattaggagagacaacaaataaccataaaacaagaaagagtccttaaatagcctaaattttcaaaaaatgaatttgaagaaaactcccccaaaattgaagaaatgacaaagaaggacaatgggagaaaaaagatgagaaaattagagcattaatttaggaggtcaaacatcctactattcatagttccagaaagagaaagcaaagaaatgaagggaaggaaattattttaaagattgtattagaaaatatctgagaattgaaagatgtgagtctccagattgagaattgtccatcaaaggtccaaaatgatgaatgaaaaaagatcccaccaaggtatattcttgtgacattcagaatcttctctgaaatttagtatttatggcttccaaagagagagagaaaagaaaaaaaagtctcatacaaagactaggcataagaaggcaccatattatacaacagcagcatcaaaaactaaaagaaagttcacattcaaagaaatccagacagaatcgacaaaatcaaaaccatagcaggaacatccacaaacctctctcagttttggccagatgaagtagacaaaaaatattttaaatttgtagactacagtaatataatatgtttgatttaataattaaacttcatactttatatattctatagatagaaaacaaacatgtatttttagttgccattgaatattaaaaagttgatcattcactcctgtaatcccagcactttgggaggccaaggcaggcggaccacgaggccaagagatagagacaatcctggccaacgtggtgaaaccccatctctactaaaaatacaaaaattagcacggtgtggtggcacacgcctgtagtcccagctacttgggaggctgaggcaggagaatcgcttgaacctgagaggcagaggttgcagtgagccgagatctcaccactgcactccaacctggcaacagagtgagactcagtctcagaaaaaaaaaaaaaaggttgatcacgtaccaggcaacaaagaaaatgtcaatacattccaaagaagttgaaattgtgtaagtcagatgctttggccgtcctaggagcatttgctaataaactcaggaatcaaagggtttgggtttaaatagccacgtggggatgggaggcaatggtgtggggttatgtgaagcagggactcttgaaggctacaagctcagtgaaagactagaaagcaaaataaaacaaaagacacaaacagacaaacaaacaaacacagaaatagggaagaccacagaaaaaagcccgtctgctttggcttgtgcgatgagtgaggaaggcaagtctttcctggaaatttttatctacaagcccatccagatgtgaatttggggtacacatgtacactatcttcgtggtctggcaatttctcagccaaaactggactcaaaatatggtcctgagttgataacatctctgaggctgttggcaaaaacaaattcagaatttctctagaaggaaaatttttccacccagtttcctcacagataaagccccaagaaatatgaactcataattgaaaaacaagctactgtggggagggggtcagtgaacccaataaacagaaggattagactcccagtaattacagataatgtaattacataaatcagattataaaataaatatgtttagaatgagtgaagaaataaaagaaagaataaaaccacaaggaaggaacagcatactactattaaacaggcatgccattttcattgattctaaaacacattttaacatctctaattagggagtattttgcaaccaatgtgataagagagcattgtccatagtttaggaagcattgtttctttcttagtagtatgtaaaattgtggtatgccttaaattcaaggaaatatggtctttagacatatataatgtttaatcatatcagagtcagaaatcattaaaggaaaatgattagtagattttgcaacatcacaatataaggctattttaggttaaaaaagcatcaaaagacaaagcgggaaaagtatttccaaaatttatgacaaataaggggttaatgtcctcacactacaaaataggatattagtatgggatgagaatacaaataggaaatgtaagaatgaagaaatagaaatacaagaaagtattcaatttcactaattggtaataaaagaaacaaaacaatgaaaagtttgatcatcaaatttgtgaagatgaaaaaatcaatcactatctgaattgtgctgaaaaattggcactcaaacactacaatcagattggaacttggtatagactttctagagggcaatttggcaaaatatataaaaaggatgccacctgactgaatgatttcacttctaggcattcttctaaaaagacataaccatgatttttagcacatacttacccctaaggaaattgctcacactacgcttgtaatagtgaaaaatgagaacttacttaaatgtcgtcttagaatttatttacataattatacaggtatatgcaaccatcatataataaatactgacatatgcttaatgacacaaaacatatttaataccaaagcaatgtcccatcaagacctatttacaaggctttagtatatttttgagttaaaatcaccaaggtatagaccagtatgtagtgtagctatcaattatcttaaaatatctagaaaaaaaggattggtgattacacctgaaaatgttaatagtcattctctccagggattgggactactagtgaaagtactttttgtgctttttttatattttccaaaataaataatgaaacttttgtttataggttaaaacattatcttggccaggcatggtggctcacgcttgtaatcccaacactttgggaagccaaggcaggtggatcatgaggtcaggagttcgagaccatcctggccaacatggtgaaaccccgtatctactaaaaatacaaaaattagctgggcatggaggcatgtgcctgtaatcccagctactcaggaggctgaagcaggagaatcacttgaaccagggagtcggaggttgcagtgagccgagattgcgccactgcactccagcctggtgacagagtgagactccgtctcgaaaaaaaacaaaacaaaacaaaaaaaacaaaaacattattttaaaagataaagaaatataagggctaaatagtgaccactggttttggcaacatggaggtgactttgccacagcaggacatgtgtaaccaggtggtcgtgggtagaagagttattgataaggggctggaaactcttctagaagtacttttcaaggagcttgacttgagaagggaaggaaagagatgcagtgggtagctagagaggtagttgggtcatggcagagttgtttttttttttttccttttttttttcttttaagatggaaaagacctgagcatgtgtaggctaagcggaaggagcagtggagaggaagaggtcaaagctggggaaagagaactgcaaacagatagagaagagcctggagggggagggggaggaaagggctgagtgatcccaaggatccgcgtgagcgggaggtcatgagtttgctgtggatctaatcaatgtggatgcagggttattccagaagcacttggccacctgggcatacagactaagcaggtggcttgacctaaatcggtgcgtaagcctgctgggtggtgcatgggagtgaggacatcagtgagaacatggttcaggcgcaatcatggggcaccaaagccaagctaagtggggaagtgaagtccagagaggccactgggtagagaggaaatggatagtcttatgtctgtatcagtaagtactggccaggcgtggtggctcacacctgtaatcccagcattttgggaggctgcggcaggtgcatcacctgaggtcaggaattcgagaccagcctggtcagcatgacgaaaccctgtctctactaaaaatacaaaaattagctgggcgaggtggtgcacgcctgtagtcccagctactggagaggctgaggcaggagaattgcttgaacctgagaggcgggggttgcagtgaactaagattgcaccactgcactccagcctgggtgacagagtaagactccgtcttgaggaaaaaaaaaattgttgatatgagcaaaggctaaagggcaaagggtaaggggattgagagagctggtctgatttggccacagattgggctgttgttgtttaggagtctggctgtggtgtggtggctgggatgactggacataggtgcattttgcagtcatctgggtatgtcttgggtcctcaaatggtcagcagatggagggcagggctttgactcttaaagtgctttccttataccagtgggcactctgcacttcaaacagactgattgaaaagcggattccttccaacaggaagacccactccaatagcaaaggctcagaaaggctgggaagtcagttcccttctctgaatgccctcccctctgggctcccagccacctactgctgtcccagctggctgtctccctttcccagtctactcagtacttacagagaaggactttcccgccaagttggaggacttgacaacctctgtcacgttgacattcagacatgtgtggtctgtgacaggagcagcaggcagggggcaatggctagaccctgaaactgaatgagatgggtggggctgtaaatggacctccagggaagtaggggagtttgatattctaggtctcaagatctccaggaacccatcttgacacccccagccctgtcactcctccttgggcccccactttctgaatctgcttggtcccagccaagttacgtttccttctcaatcatccatcttccttccctggtgaatccacaagtttctgtatcctcaggtcagcggccatcaccaacccaaatccgcacgccctaccctttcattatctcctcctgcaaccctttttaaaaggaataaaattctagaagttctcttgaacttcctgcagctcttgggcatgctaagaatgaaagaagcacctgcccagggatgttgtgcaggacagaggctccaagtgggtgaggagggcatcagtgccaacaggtcaaggtttcttttactttctttttttattattatttttttgtgcatatatatatatatatatacacacacacacacacacatatatatacatatatacacacacatatataagtatatatacatacacacgtatatatgtatatatacgcacacatatatatgtgtatatatagacacacacgtatatacatatatacgtatatacacacacatatatatgtatatatagacacacatatatatgtatatatacacacacacgtatatatgtgtatacatacatatatatattttatatatatatatatatttttatatatatatatattttttttttgagacagagtctcactctgttgcccaggctgtagtgcagtggcatgatctcggtcactgcaacctctgcctcccaggttcaaacaattctcctgcctcagcctcccaagtagctgggattacaggcgggctccaccacactggctaatttttttttttttgtatttttagtagagacagggttgcttaatagagtataatgtgtcaaaaatcatcactgtgtgcctgctggtaggcttcgtccctccctgccaactaaagagggtttgtagaagtctgctctaccgagggtgctggcatcatcagactggttctgatagggtctagagtagggctgggagtggggagagtctgtgagagaaatggaaggaatatagtttgaacaataagagctaacatttatcgtttactctatgcacacaaattagtagctacttattatctccattttagaaaaaaaaaacaggtagagaggacacagttcacacatctaaggtcacatagatagtcagcggcaaagctggggtgtgagacctgcccatctggccctggcaccgcgcccttgatggtctgctcctgagccacttctaggttaagagctactgccacaattatgcgtctccttcatggtgttaaagagctgcaggtaaagagtgtcctgctgtgatggagttttatatgtcatccacaaattcaacttgcctggaagcaattttattaggaagtgatataatttcttgagtttcttctttgtgccagatgctaaggaaattgtgaagctatgatgcccacttatgaacacaaatgcattattgtcagaaaggcgccttaattggaatgctagcaaagccacagtggatttcagagatggagtaaatactcgtggttggataggagaggagggatcagagttggcttcctcatgagcattccagcctggcttatgtgtattttcattccgtatttcttctggaatattccaaatgtgttcatccatttttaaaacaaatttttgaatgtaaagtagcatttcatttattctagaaatattgatcaagtatctaccacatgccaggacatgtcatggacaaagggaatagatggtgaacaagatataattctgcctgggtgaacttacttgtttgctccaaaatgatcttctacaagcatcaccggataacatcccctaagtctagtctgttgagatttggcaatcccgggggaggcagtggtaaggaacataggctcttgcatgagaatacctgggtttgaattccagttctgattcttcctcacagaggtgatgttgggtgtgttattctctttccttccatttcctctccagtaaaaagttactaatactaatagtatctattttctagggttcacaagcttcactgcctggcctctggtgtttgtttgcaatattcataatccgtatcgccatcctttgcattattccaggagaccagggagctcacaatatgagctaatatttataatttactatatgcacataaattggcattttctattgtctccattttttttggaatgacagtcaaagtcctaaatttccaaacagaagacaactagtcctgcagtcccaattccgtggcaggaggccaactgcaacccctccccggagtccctccaccttccagctatgtctcagcaggctgctgaggctcaatccagtggccagtgctagagtctgggtgacccgacagcaagcaacttgaaggcagtcaccaagtcctggtcctggctccagttccgtgactgagagggctcccccttctcctgccactctgccctctccccagcattgcccttctcatctcttctctctttctttgctctgcattccccattcctcaccttctgtgtcgctggctggaatggccttcaggatcagcccagtggcccgcagggaaacggtgacctctcggggccggtggctaagcaaggcctgaggagggggatcgaggaacaggtggaggtgctcaggacataccctttccccatgcatccccacatccacagtcttgcctctctcccctgttttccacccctgctgtgagagtctttttttttttttttttttgagccagggggtttcactatgttgcccaggctggtcttgaactcctgggctcaagtgatcctcctgcctcagcctcccaaagtgctgggattacaggcatgagccacggtgccagacccggttttgtctatgtcactaaggtcccataagtgctagcagataaaggcttaaagcacttctagtcctagagagtatgttcagccttccagaccccaaagaataaatctccagtgaaatcagttcaagcctctggtcagctagcaaggaagatattttttagcaaggggtcagcccccttgttccttaaatctgatcacctcctggtctacatgtaaggccaacttaacccacccatccctgcaaaactccctgaaggctggggaactctgcgggcagcttcaagaaaaggggcagaagcttcctttggctctatctgcttccctgcttgtcccagaggcctgctccctccagctgtacctcttggctacctactgaccacgtccatgcacactgaccttctggtagcatagggagagctctgcccctgggccctcagccacgcctctcctcctgggtgaaaagccatctgtggggagatgagaagaggcttggggtggaggttcccaggcctcttgccctaacttccccacctctctgagggcaggagctgagctgctgggtttacccatccatccatctccctggatggaaaggtgacacctccgggggccaggatgcctttcagtcttgtgggggttggaggggatcaagagcagccttggcattcagcagaggtagggaacagagcagggacaagcactgagggtgtgggcgtgcaggcatcatcaggtgagaggtggaaggatgagagtttggagaagctgagtcagggtgacctttggcaaaagggaggcagatgcttacctttggggaatttagaatcttggatcttcaccttcagttcaatgaggaaaatgtcctcagtagggtcttggctcaggtcactgaaaaagatctggagagaggaagggagggtggcatttcctggtgtgatttccaaatcactctatccctgatttccagggatccagggccatggagaacccttccacataaagaagacctacttcttggatttgaggtcttgaagttaataatgatctgattcatttagagatgaagaaggtaacgttaataaccaagagcgtctgggtgtgttcatgattggtggcctggtgaccagtgtttccccagagcctgggtatttaatcggtggggtcctggggtcccttggagcctccagtgggatgcttaccttgactgtgtagatctggaaatagatgggttgggtgcccatgcggatgtagtaggtgatgacgtctaggatgaaggggtccacagtccgggatgtgtccagggaaggaggctgtgatggagacagggaatgtcttcaccaactcccccaaggccactgtgggagatgccattttcttcagagagaaacttcaagcccctacatctctgggatgcactaacccagtgcgtccttcaacacattccaaacctttcctaccactgaatttccactcccaatcaaaatattcctgtccagagccctgcctccctagggaatccgactgatttcaatcctacagagactactgagcgctgctatgtgtgaggcactgtgctaagtgattgagggagacaagatgctggagagtgaatctaatgagagacccaggagtgggttctaggctcggatgggctacttgccattggccaagcaggcgtgggcaagttattcaaactctatgaggcccgagtgtccttctacagaaaatgagaggttgaaccagatgatctgatgtctctttcagctctggtggtctctgcatctattaataaactaattggctgggtgtggtggctcaacacctgtaatctcaacactttgggaggctgaggtgggcgggtcacctgaggtcaggagttcgagaccagcctgaccaacatggagaaacctcatctctactaaaaatacaaaattagccagatgtggtggcacattcctgtaatcccagctactcaggaggctaaggcaggagaatcgtttgaatccaggaggcggaggttgcagtgagccaagattgtgccattgcactccagcctgggcaacaagagcgaaactccatctcaaaataaaataaaacaattcaggtttgcgtgttattgggaatggactatgcgtcttgtcctccagtccttccctggtcccatatgatgataaagcatagtgactgggttttcagaacatctacatagaatgtgatagtgtcagggctagaaggaagctcagagttgatctcatccaactcatatccgatcctctaagacctcttctatctctcacatctggtgtactgaaatattgttcccttcgaaagggtcacactgaggagctatgaacgtagtctaataatgctgtcattgctcacattgtttctggtatcttcatgtggaaaccgcttttggagtaagcatagggccattcaaattgttaattacaaggagaaggggaaaaccaaaaccttacagtgtcccagcggagaaaaatagctaccagcaaaggagcaccaatggggcctgcatcaaatgttcccactgtaatagcatccaagtttcaaggaaaaagtattttaatacccagctaaatggtctttgtgtgtatgcaaagacattttcggatcaggtataagccagaaaatgtgcacccctaaatatccttattcgaataaaatatgtaagaagacaccctcatcagtcaaatgataaagcaaaatggagagctcagtacagtgacaagttaaaaaacagatatgtaaaagtggtaaattaatgttatattttttaccgcagtttttaaaactaaagtaaataaatgtgtataagtcaatagctttcttttatattagcagcaggcactacccaaatataatggcataaagataccattcgcaatagtaagaaacactatcacacacgagtaataaatttagtgagaattggacagaagctgtatgacgcaaactttacacttatactgagggatatataaggacacttggacaaatgaagagctacaccatgctcctagagagaaaaactcaatatgcgaaagatgctaattctccccaaatttcaatcgaaatccaataggattaaaaataataacaaaaacaaaacttgaaattctaaagtttatcaggaagagaaataagcatattctgaaaagttttgaaaaagaagaataatagggtaggcaggcttctatagccagatattaaaatatcaaaaggctaatttgtacagaaatgaataaatcaatgagagcataggtatgtactaaatacttacaagcacatgtaaggatcacgtactaaatacaagcacatgttagtatcatgtactaaatacaagtacacgtaagtatttagcaaatgataaaagtggcatttcaaatttctgcggcaagatggtttatgcaaaatagctttaggacaactagctcaacatttggaaaaaataaaatgacatacttcacattaaacaataaaattaactgcagatagacaattaattaaatgtaaaaattgagacatggaaagtgttaaattatcagtgaacatttatttaagcttttggaagcatgactccaaaggcagaaactgtaaagaataaaagtgctatgtctgactacacccaagtattaaacttctgcaagtcaaaaagtggataggcaagttacaactatgggaaaaaaatctgcaacatatgtaacaacaaaaaagttagaattctcttactatataaaagccctttcaaatcagtaaaagatgagttccctccccactgccagccacggttggggtatggcagtgtgggtttgtggttaggagagggtgctctggagtcaagctgcctgtttccaactggcattccaccactcattctgtgacttcaggcaagatacttaatctctttgtgcctcagctgctctatctgtaaaacggggctatggtgacaatggtacctaccaacaggggcacctgcctctgggctgctgtgggaattaaatgagctgccctgtgtgtaagtgtttagaacagtgcccagtgcagcataagtgctcaggaaacatcagctgttacaatcattgaaaaatgattcattccactataaagacacatgcacacgtatgtttattgtggcactatttacaatagcaaagacttggaaccagcccaaatgcccatcaatgatagacaggacaaagaaattgtggcacatatacaccatggaatactatgcagccataaaaaaagagtgagttaatgtccttttcagggacatggtgaagctggaaaccatcattctcagcaaactaacataggaacagaaaaccaaacaccacatgttctcactcgtaagtgggagctgaacaatgagaacacatggacacagggagtggaacatcacacaccggggcctgtctgggggttgggggcaagggaagggagagcattaggacaaatatctaatgcatgcggggcttaaaacctagataaggggttgatgggtgcagcaaaccaccatggcacatgtatacctgtgtaacaaacctgcatgttctgcacatgtatcccagaacgtgaagtaaaataaaaataaatagataaatgataaaaaaagaaaaaggatcacaggaagctcacacaagaaggagtataactgccctacacacttacgaaggaatattttacttcgtcttttccacggtggtctggtccaaagtacgagcctggtaagtgtcccgagtgagttcaaagccactatctggttagggcccctgtcttgaattcccttcatgtctcatcccacctgactcttaaggtcaaaggtcaagtgcagcagcaaaaagatggccccctctcacccccatttcaccctcgctgcctacttgggctcctccgttctcccctctgcccagaccccactcccgtccctctctccctccctggtaccctcaccctcccctaccatctcagccagcttgtggatggcggggcacagcgtgttgacgttgctctggtaccacgggtctacgcggcccaggaacgtagccagctctcccagctccggctgcctggatgctgcaggcttctgggggaaaggggatggggcagacccgtcaggccctctctccagctctgccttccagctgccatcagcctaggctgtgtgaatatggtcaagtcatttaacctcttggggcatgaatttctgcatgtgaagacacgtcgttgttctgttttataaactcagatgaagctagaatatcttttgctgaggttcactcagcagggacattgaaaaatgatcaccgactttaaaaggggagagacaagtatggctttgaccttactgcttcccaataggaagtggagtgtgtagtaggaagtggagcatgcggtaggagtaaggactgcaagtgtggctctgtccccacaactagatcaatggacttcactgcctgcaatttcctttcatgtcataccagaaagtgtggggtgtgtgtgtatgtgtgtgtatgagagaggggagggaaggggagagagagagagagagagaggagagagagagagagagagagagagagagagagagagagagagagagagagagaccgccctgtgtttgagaagtttgcaactaattccattacctacaaaaacaaaacaaatagcagcaagcaggctgccatcaagagagagacccaatctctggccacatgcaacccccagagcaccgtctgcagcctctgaaatagaagaccgctgacctctctcccgcctccacattctaaggatgcttactctagtccctgagccggggatgtgggggatgcggggctgcaggtgtgtccctgcccagcctgccctgtctctgccccgccaccgcctccccgcggtccagtcacctcaggcgccagcacggggatgtagtagagctgcaggctgagtctgggagtgaggcagaacttctgggtctcccgtttcctagcaatgggcagcaaagcagaggaggttaggggcggggcttggcttcaaacagactcggctctgctatttgttatctcttgaccttgggcaatttgtgtcatctttctgagcctctgctttctcatctacaaaatgggtacagtaatgtctccctcgcaggatggtgatgagggttcacggagctaacgaacacaaagcagggattgcggtgctctgtgacggctgcgggcactgtgcggcatcctcctccgtcccaccctggcctctgcctcctgaccctctcttgccaccctgtgatccttcaccagcccacgccaggcccacctgtgcccctgaccagcgcccacccccagcccccacgtcggggccccacctgagtctgtggtaggcctgggccaggcgccccagcatcctgtcatctccgagcacaagtacccgggctgtgtgcagccgggacacgccgggcagcatttccccatccccactgggccggcctgtcctccggtgcagccctgggggcccgtcccagctgccaggcatcaagaagtccaggggccatgcacgcttcttgatgccccctttgcgctgcagcccggctcgctccatctcagggctgccgggtgcaggcagctcatcagcccccgtgggaaggtcccgctcaatgccgctgtcagtggacagcacagaaacccgggccaactcccggtccggccggaggccctgcagatccaagacctccaagtcagcactgaggcgcagctgggatcttgggcggaggaagagcaccagttccttccctggggtgggggaacaagggcggtgaggacacgtgaggctggcagggctacgtttctgatttcagccagtcctcttcagaggatacacacacacagaaacacagacagacacataaagacacacatatgaacatgcacagagactcacacacagagacacacagatgcacacacatacacatgtacagacacagacagacatacacacacgtgcacacacacagacacacacacagagacacactgaaacacatgcatgcacgcatacacacacagacacactgacacacacacgcatcatgcatacacacacactgacacacgcatgcacgcatacacccatgcaagcacacacagacacactgacacacacacatgcatggatacacacactgacacacacgcatgcacacatacacacagacacactgacacactcatggatacacacactgacacgcatccacacacatacactgacacacactcatgcacgcatacacacacactgacacacactcatgcatacacacacactgacacacgcatgcacacagacacacactcatgcacacatacacacacagacacactgacacacactcatgcatacacacactgacacacgcatgcacactgacacacactcatgcacgcatacacacacagacacagacatataccactgtttccagacagctccatgggcacgtacagagctgctcctcaccggtccacaagtggaaggtgatgtaggggctgggcaggggaatgcttggtggccgctcttggacaaggtcacctgcagaaaggagcaggctgtggaggccatggaggaggccatgggaccctcctctgccctccccatcctgcccagctcctgtgcggggtcttagagaggtggcagggactctctccttcacatctggtctgcctttccatctctgccaccaccagcccatccagggcccaacagtgcagctgtcccctccctgtccaacaatgcttagtagctacgttttctcaaacctagctcaacccttagggggtcttcacaaaccagctcacaaggccttttccaacctatgctcctatgctggccatgccttcagccctgtgcagctgccagactggctttcccactgttcttaaaatgccctgcctgcatccagacgaggcaggaaagacccctgcccttctcagggctgcttccaatatcttgcatgcagtagacactcagttaacatttgcagctgtcggcgatgctgacgagaactcatcaacaaagtttgggggcagcaggaaccccgggcagtccaggggagagacaaaggacagcccttcttcctgcttctctttctagaatcttttctgaccactccagtggcccgcggtggtcattccctccgagcagactgtctgcacactgggcacacctcacatgtggtcttaggatttggctccgtattcccgtttcacttctatattgctgtggctccccactcatgaggctgcaagcttcttaggggagagcagctagtgttcactgagcacctactgcctgccaggccttattctactcacctggcacacactgtaatcatttctctggatcctgccaatggccctgggcaacaggtgacattattatcctcaatttacaggggagaagccaggacacagagaggttgaataactggcccaaggtcacatagtaaatagtacagtgacgacttgagcccaggcagctcagctccagagttcctgctcttacccacaacactgtgcttataatcaccactccatactgccccctacagccacaggggcttgacgggggtgctgcctggtcattaagatgcacagggcttggccgggcacggtggctcatgcctgtaatcccagcactttgggacgccgaggagggtggatcacgaggtcaggagatcgcaaccatcctggctaacacggtgaaaccccgtctctactaaaaaaacacaaaaaaattagctgggcatggtggcaggcgcctgtagtcccagctactcgggaggctgaggcaggagaatggcgtgaacccaggaggcagagcttgcagtgagcggagattgagccactgcactccagcctgggtgactgagcaagattgtgtctcaaaaaaaaaaaaaaaaaaaaaaagatgcacagggcttagccaggtgtggtggcacgtgcctgtggtcccagctagtcgaaaggctgaggtgggaggatcgcttaagcccaggaggtcaaggctgcagtgagccatgatcgagccactgcactccagcctgggtgacagagcaagaccctgtctaaaaaaaaaaaaaaaaaaaaaaaaaaggcacagggcaagtctgggcaggagacaggtgcccttggatgtgtcttgggggtggcccagatggtcttaattaatccatgcagagtcactggtgagtgttagcaaggggccacaaggggagcaaagccagattggccccagggttagtcccagcttggggtacaggaggagctttttccatgtgggatcagaggcagtgtagaatgttaaagtaaaagagcggacaacttcgaagatggagtctttaggcagggactatcctgcccacctcacccaactgctgtggcctccacccaacctgggctgccaagttcaaacccagggcctggcacactaacctcttccggtggattccagtccttaaccccatgccttataatgacaggtgcacgatcagtgactgtgcatatctgggacatgcaggctgacatattccatgatactttgaatgaccacgaaataggacccaaatcagaaccatcctacaacagccaggaaacacatattcgggacgtttctctgggctatttcagatgcccccatccacatggggcttgtgtcagggtaggcattatcttacctacattatgccttgcataagataaggcgttatcttataaatatgcaaataggaagggtgaggaataaaaatctatgataccagatataaacgatgttgactcatctgctcttttagatgctctggtccttggacgatcaaatccttggattactgcagctgagtagtgaactagacagcctggatttgtatcttggctttgccatttactgccttgggtgatcttgggcaagatatttaacctctttctaactcagtttcgtcctctgtaaaatggggataataatagtttctgcttataagttgactgtgaggtttcattgatttaatacagtatacgcaatatatttaaatatatgtaaggtgattagaacagcaactggagtatagtaggggctctgtgggcatcggcggttatcatgaccaaattacccaccttctttttttttttttttttttttttttgagacggagtctcgctctgtcgcccaggctggagtacagtagtgtgatctcggctcactgcaacctccgcctccctggttcaagtgattctcctaactcagcatcccgagtagctgggactgcaggtgcccaccaccacgcccagctgatttttttttttttttgagactaaaccctctactactttagtagagggtttccccatgttgcctaggctggtctcgaaaccctgacctcaggtgatccgcctgcctcggcctcccaaaatgctgggttaacaggcgtgagccaccgctcccagcctaattacccgcctcttagtcccggtcctgccaaacccccaggctgcccccagtccccaggctcctgggagtcggccaggcacccagacagaggcaggtccagcgctgctctctggcgccccctgctgtgcagtgagctgcccccgcgggactcttgccaaggccccccatctgccagtcgcttaccaccgcagcgccccgccgcgggacccagcagcgagcagtaaatctcctccagcctctctacgtgtccctcccggctcgggctggcctcgctggccatctgctccaaggcggccaccacggcgtggaaatagtgctccagggtgcggcgagggctggcctgttggggaggggcgtcagagcctgggtcttggcccagcgcccacgcaccccagctcctaagccaagtccgcagggccctggcagcccaaggtgacacctctccgctgcccctgggggcccggcaggagcttcccccgaaggcttctggatcccacatccagggccctatgcctgccctgcaagtgggggttcccctctgcccctcacacgctattatggggagactactggtctgcaatgtctgttacccagagaggcagagatagccactgacgcccacttcctgaaagcgtcacccagcacttggatcaatgttctagcccccactagattgtgaattccaggaattcacagggaattttgtctgtttcattcatagctgcatctccagcacttagaatagctcactgcaccaggtgttgttctaggggctgggatacagcagcaaacaaaagagattgtgtgatctgggaagccccccctgagaaagtgacttttttttttttttttttgagacggagtcttgctctgtcacccaggctggagtgcagtggtgtgactttggctcattgcaacctctgcctcctgggttcaagcgattctcctgcctc[134 bp omitted]gcctcccaaagtgttgggattacaggcgtgaaccaccgcgcttggccgaaagtgacttttaggtaaagacttgaagtgaaagagtgagccatgcagcccagcgcggtggctcacgcttgtaatctcagcactttggaaggccggggtaggtggatcacgaggtcaggagatggagaccacggtgaaaccccgtctctactaaaaatagaaaaaattagctgggtgtggtggccggcgcctgtagtcccagctactcagagaggctgaggcaggagaatggcgtgaacccaggaggcggagcttgcagtgagccgagatcacgccactgcactccagcctgggcaacagagcaagacttcgtctcaaaaaaaaaaaaaaaaaaaaaagagtgagtcgtgcaggtatctaagagaacgttccaagcatagggagtagccagcgcaaaggccctggggtgcaagtatgttaggcatgtgcatgttgggagacaaatgaggaggcttgtttagctggagcagaggaaatgagagggaaagttaggagacaggccagagaggaaatgaagagagatgggaacaggtcaaggccctcaagatgaggttcttgtatttttatttttagagatggggtgtctctctgttacccaggctagagtgcagtggtacagtcacagctcactgcagccttgaacttggctcaagtgatcctcttgtcttccgagtagctgggactgcaaacacatgtcactgcgtctggtatttttttttttttattactttttgtagaaatggggtcttgctatgttgcccaggctggtctcaaacccctggccttaagcaatcctcctgcctcggcctctcaagtacctgcaattataggcatgaaccaccacaccaggctcttataggtcattgcaatcactttggctttgactccgagtgagatgatgtagtagctactgttgtggtgacccagattcctgctttcggggctgagacactcattcaccctgctgctaggaatactggcattatcttatatcttattattggttttttttttggaaatggagtctctctctgtcacccaggctggagtgcagtggcacaatcttggctcactgcaacctccactttccgggttcaagctattctcctgcctcagcctccagagtagctaggattacaggtgcccgccaccacggccagttagtttttgtatctttagtagagactggatttcgccatgttggccaggctggtcttgaactcctgacctcaggtgatacacccgcctcagcctcccaaagtgctggggttataggtgtgagccactgcgcccagccaaaatgtattaatttttgatttgggggaaaaggtgatgcgaaacaggagaaggaggaagagcagggtgaatgactggtatgggcatgcagggacgagggctgggactgacaaggggctgcaggcagggccattacctgcagcttcctgtgcagagcgcctgcgtgacaggcctcccccagagccgcctgcagggcgtgggagaccacgtggcgcatgcaggtctctggtgtctgctgcgcctgggccgcctcgatctccagtagcagagcactgcacacagacgcagacaccagctcaggatccacgaagaggaacactctgagggcagaagcagaggggagaggtgggattgatagtaactaatgggagaggggccaccggatgggcaccctcagagctgtgcagcacctccaagtaatttaattctgctaaaaagaggagtctcagattcaaaagtctctgggtgggatgacaatagggagtggtgaggactgtggcaaataagagcatgcacagcccttctagaggggcagctctaatccactgtccacagaggaaagcaggcctagtcccatgtttaggaaagttccagcctcaatcctgctccctctctcagcatcctggcccagggaccaggtcaccctctaggagggaccctaaatccttcctgccagaactggagttctgaactctgagtgaatctcaccttctttcatcactcttatcacaccagagagccaacctcccctactccctcctcctcacccactgtgtctccccacctctcccatgggtgccctgggcctccttgcatctttcatgaactcagcacctcacaccccaaactcaagctgtgcctttcagggccaagttagtggaggtgcctgcagaagagggaggtgccgctcccaacttcatcacccctctccccaacacgagcaggggacacttcctcagtcttatctaagaggcttggcgtcccccatggaagccctctggcttcattgtgcacttgcgcctgagcccctccgctatggctattctggagtctcctctggctgcctggctggtatgatgctgcattatggccaagggcaggatggaggtggaatgacagagccccagagtggccccgaggccatgtccaccttctgcatgtgagcagggtagcttccaatccaacctgagaagaaagacctatcctgtgttcagtggtctccagaaaacaatatggcgccaaccttgaatggcaaacgcaccccactgctggacaaatatcatggctggggaggtctgctagggctcttcttaatccagcctcctcttttgtcctcctgccagggagcagtcactaaagccacaacagttttaggaggctgaaggtagcaatttttctggggccactcacctctcctggtagggatacagctcattcgtcaagttctgttcggcaatgaccatcctttggtacagtgtccctgcaaaccagaccactttggccaaacagcccccaagtctctgactcccattctccaccttcctacagaaggtgtggaggcttttgagctccccggtatcctggagaaaaaggaaagaccctgggcaatgttggaggtgcagcgtgggagacaaagatgcccagtgactcttacctgggacagccatctccgttttcagccttatcgcgcagtccaaggcgactgtgcagtagggggtgggcagggtcagtaaccttgtgcaaaaggcatagattctctggtagagctcttctgtgattcctgtggcctgggtgagagggaggagggggaggtgagagggaggaggtggaggtaagagggaggagggggaggtgaagggtcccgggggagtttccggggaggggcttgggagaagaggtggaaggtcaggcctaacagccagacctgggctcacagctctctcccaaacccacaccttccagcctcttctcccagcacctgtaagacatccatttgtcgccccgccccaacttaccaagataaaaattcattgcatcaagttatgcaagcaaatcaacttcctcccagccctcctgctccatcagggaagcacattcctgcggttctccaggctcaaaaccatggaggcacttcctcagtctcctttgctcctccttgcatcccacaggcctgaaatgctccacagtgcccgggaggcccccctctccctcccgacctcagtgtgccctccgtctctgccggagctaagccccatcttgaccctggactctccagcaaccccagacttggtcttcctgcctgccttaaccaccactcccacccgctgcaacaacacgcagctcccgattactcctcctgagacattaaccacatgagtatcatgtctcttctctgtgtagggatcagtgatgtctcctgttgcactgcacacaggagcaaacccaaagacctcatcctgcctttcaaggccattgtctctccagagttctctctccatatgggagggaaagggggtggctagtgctcagaagccagtttagggcaggcaatccaagggattttctaggctcatcctggcggagactgagtgcccactaaggggagagtgtccagcccagccacatgcaggtcaccactaccacctcgacctcagtccccagctcaccttggtgagcacgtacattacagtgtgcagcaagggaatgatgacatgccggaggtcctggctttccgcctggaaaacaggagatcacgtgacaggtattgggctgggggaatccccacttcatagcgggaggcagtctaggctgggagtgggcaggagatggggtggaaggcagccagggggagagcaaagggccattgtctgctctggatagaggagtggggaggggagggcacacaggtgaggaagcccctcagtgagggtgtgggagcgtgggggggcctcagagaactctgcaggtgaggggccaaatttaattagggtaggagtcgcagcaaagcaacaaacaagtcctcagctcggagcctcccttgagtgcagtgtttcccaaacggttgcaaagtacaacattgggtagtgtgaaggagaatttaggtggcccgaggataattttgagaaacgtcaatagtcgtatatttatgtttataggtaccttctgtttctgacaagtgatgcgggttttccatttgtggtcgcgttatagtgcttctttttgaaagatgtttattcaagtaaaacaatgagagtcgacgtaaagaaaatactgcttacgtaaaagtacaggagggagatgcatatggtaaaaatcatgcaggcaaccaaagcttatgagatatagcgctgccaggactgagcccctgcccaattggcccctctcttcctttcatccccgtcttcctccctgaggtccaggaactcaccttctccagttctctgagaagaatgcggaccagcactgggctcttaccgggatctcgctcgaccttcttgtgcagggaccacctccacatgcctgggccaggagaaaggggagcccggcatgagcaggtgggcagttcttagaggagacccctctgagcaggaccctgagccctggagcctcagctgcagctctgaccagccacgggtgtgaccccgccaccagcgcttggctccaggtgcacctgggtgggctcctcccaagtggggagttctagtctgtagccctttgtggacagtgaattcccagggcagaaaggagggcaggtgggacacaccagtggggacaggtgtgtgacaggtgtatgcgtgtggaccacagagcagcagtgcttgcaggtgtgtgctccgagccacattctggaagtcctgcaggcctggagtgctgaggggaattaggtttggaagtggagctagggaaggtggttaacaaagagggtggcaggccgggtgccgtggctcatgcctgcaatcccagcactttgggaggctgagacaggcgggtcacttgcggtcaggagttcgagaccaacctggccaacatggtgaaactgcatctctacgaaaaatacaaaaattagcagggcatggtggcacacgcctgtaatctcagctacttgggaggctgaggcaggaggatcgcttgaaccagggaggcagaggttgtggtgagccgagtttgcaccactgcactgcagcctgggtgacagagtaggactccatctcaaaaacaaaagaaaaaaaaaaggaaagaaaaagggtggcagatccccaatgtgctctgtggcagttgctgggagggttgaactagggagcagagaagccttctcagtccttcaggctctaggtatttccagcaggaaaggggtttggtgagacgacccttgccccctgagctccaggccggggctctttcctgtatgcgcgtgtattgttggctggggttgggtggaggtcagagggaccagctgctgctgccagctggctcttaccttggttgctctgcagggcaggggcctgggtgctgagctcccggagcacagcctgcacgctcctctggaggtccagctccacatctgggcagtggtaggggtgggaggaaactcagtccactgaacctcaccctcgtcccacctccattccttccgagagtgtctttagccatttctctgagcctcaggaggtgcccgaagtaatcgacttagagctggcagccagcatgccagccagggctggaatatagccttcccttccacgtttctgtgttctttgtaaaacctgcatttcccaaagtgcagtatgtgtaccactggtggtatgtaggacaattttaggtggtacacaaacgaccttaaaatctgaatagttatgcatttattttaatgcatgttagaaaatacatgtatgtattttcatatatatgtgaaatgtatatatcctccaaacatatatatgaaatatatatatcctccaaatatgtatatgaaatatatagcctccaaatatatatgaaatatatatagcctccaaatatatatatgaaatatagcctccaaatatatatatgaaatatatatagcctccaaatatatatatgaaatatatacagcctacaaatatatatatgaaatatatacagcctacaaatatgtatatgaaatatatacagcctacaaatatgtatatgaaatatatatagcctccaaatatgtatatgaaatatatatagcctccaaatatgtatatgaaatatatatagcctccaaatatgtatatgaaatatatatagcctccaaatatgtatatgaaatatatatagcctccaaatatatatatatgaaatatatatagcctccaaatatatatatgaaatatatatagcctccaaatatatatgaaatatatatatggcctccaaatatgtatatcaagtatatatacagtctccaaatacgtatatgaagtatatatcctccaaatatgtatatgaaatgtatatcctccaaatatatatgaaatatatatatcctccaaatatatatgaaatatatatatataaaatatatatataaaaaactattaggtttgtgcaaaagtaattgcagtttttgccattattattattatttttgtgtgtgtgtgtgtgtgtgagacggagtctaactctgtcatccaggctggagtgcagtggcgcaatcttggctcactgcaatctccgcctcctgggttcacgccattctcctgcctcagcctcccgagtagctgggactacaggcgcctgccaccacgcctggctaattttttgtatttttagcagagacgggatttcaccgtgttagctaggatggtctcaatctcctgacctcgtgatctgcccgcctcggccttccaaagtgctgggatgacaggcatgagccaccacgccaagcctttgccattatttttagtagttcctgaatccatgcatgaagctaaaacttatttattttatttatttatttttttgaagcctacagcaccctgtcttttctggtagtctccaccccccgccccaagtataaagctaaaatctaaagtcaatttaaagaatcgtatcagatacataccaggacaggtggtaacaaagactctctccttgaccaaaccttactcagcctcctcttagccctcttcttcactagggctcagccctggctcctgtcctgcctttggcctgcccatcccagttttagcaagaatcctgccaaatcagtttaggttggagtcctccactcttgatatctcctgaaccccttcatcccttaccgtcgatgtataagaatttgacttgtgcctctagcaaaaatcctgttagctcagtttagcaagaatgtcccgacccttgatgtctcctcttaggaattttccatccgctgaccccttcactctgctcattggctataaatccccaactggcttttctttattccaagttgagactgctttctctttcctaatgcaatagtcttggataagtcttccttaccatttaataagttccagaataatttctttctttaacagtggtacgttgacatgggaaaaaaaaaaaaccatgaaagtggtacaagaataagcaactgacatttgggaagtgtggtagctgtgagaatgtacctcgctcctctcccactaccgggagtttaatggaaccaggtccccagttgctgtgctgttgcagtggtttggatatttgaccctccaaatctcatattgaaatttgttccccagtgttggacgtggggcctaatgggaggtgttagggtcatggtggtggatgcttcatgaatgccatccttgcggtaatgagtgagttctcattctatttgttcccctgagaactggttgttaaaaagagcccggcaccttccccctctctcttgcttcatctctcagcatgtgatctgtacacactggctccccttccaccaggagtggaagtttcctgagccctgagccccttatcagaagcagatgctggcaccctgcttcttgtacagcctgcagaacgctgagccaaataaacctcttttctttataaattacccagctgcaggtattcctttatattatagcaatgcaaacagactaagacagctgtgaaatccatcactttctgctgagccacgcctcccagccaaaatacacggtatggtagtggttctaaagcaggaccttccccaggagacgctcaagcttctccaactgccctgctgagcttttcttggactcccatcagtccaaggcatttccactgacccttcttccttttctccttcatttggagtcagatttgcaccagggtctgacagctgctctcccaggtccctctccatttctgtcacacaagtgtttccccaaataaatccttgaacttggtgtctgcttcttggcagatccagactcagacaagaagtacgggaaacactcctcacacaataaattcctctttgcaattagctcccaccaagagtttgccattataggtgagtgtgtattctccagttgtcagacaacacaaaccacatgccccaagggttcctctttgactgggctatcaggaaacttacggtcaaattggggcccagcctcaaaaattagctcatctcatgtgacagggatctctcttcttggctcctttttggtcctcctgctttatattctatttaatctatatctgaattgcttcagattcctttggaagtaagtagaatagagataacaaatttaaaaatcagcagattgcagtccaagagttaaaatatttttaggccaagtcaccataggtgctagtgctcatggtctggcccctcctcagacccatgcaaagcctacggggtccacatccctgaagcccccacttggcaaggcctggtcctgaatctcctccaggctgagagtggacaggatactacagccacatctgcccacctggtccctctgctgggcagagcatcatctccccagactgttgaggaaatcatttagctcagcatgaaggttggtcacagtctttcctccgtctatgcatttccaccttgcatgaagatttaatgagttaatgcaggatgagttattagaaaattagctggtgctaagtcttttttctctctcctccctccttctctctctccctcccttccttcctttcttttttccttccttcttcctctttcttattctgtcttccattgtatatttgcaaagaaaggctgaaaactgtgacaaatgtgatttcctctcattcccctcatcagaagcacagccaagcctttgtcttctgagcttgggtccccttgctttgcaagggaagttgaatttttatgtttcacagaaaaatagagaagttgccagtagccctgggagaccacttcaaataaattttgtttttgaatgtctgggtagctaaaacaaactctcaggctttggtccacatctggcttgctatgtgttttgtttgggcttgtatagtgtcttaaaaaaaaaaagcaatgaattagctgccaacatttacaagtcaggagattttgcataacgtttgggtttctggcatctctcgaaaatctgacaatctgctgacaccgaacctggattcttctcacatgtgacaatcatagggggtggggagcaattgcccccttagataggcacagcttctctaggtctttgtagttccccatgcctcggtttcactcatttatatcctctgcctggcccctggaggcactgagtctgaggctcctggcaagttgattgagccaatcaagctggattgtctaaaaaggtgcagaagaaggttgatgcttttaaagaggagagtggcccagcccaagggtggaggttggattccctaagactgtgaacgcacaagggatatagggttccagggaatgaggaaaatcagaccggctgggacaaagcttaccagtggcggcaaaggtcagatgaaggccgctaagcactgagccctgtgcctctgatgccacagcaaaggtctcctgagccatcttcaccagagcacgagaatgtccctcaaggcaggctctatctccctctgcaccttgcaagtctggccaagcagttctggtggctgtagccaccgtggactggagacgacagacttttcccactacccagactttataaaccctgagcttctcacaaactcccacgtagggggaagcactccaagtgaatgatgctagagttcatcctaaccttggaatatgagaggttgaagctggttttgatttgattaaatggaagaaagaaatgggatatttcctgtgactcaagtggctcagcattgttcacatatggtatgcaggtctaacatccttgatgactcgaatagtcaatagataaatggcatccattattattatcctcctctgcatccaggaatgtgggatattactaattaggtattaatattattattaatattaaactttttttatttaaaatttttttaacttttattttaggttcaggaggtacatgtgcaggtttgttacccggatatattgcttgatgctgaggtttgtagtatggatgatcacatcacctaggtactatgagtactgttactaataatagtactactcatatgagtagtactagtacccacactaactagtttttcaactcttgcccctttccctccctccccattctagtagcccccagtttctattgttgccatctttgtgtccatgagtacccaaagtttagctcccacctataagtgagaacatgcagtatttggctttctgttcctacattaatttgcttagtgtaatagcttccagctccatccatattgcaacgaaggatatgatttcgttcttttttatggctgcatagtattccatgttgtatatgtaacacattttctttatccagtctgttgttgacaggcacctaagtagatgccacatttttgcttttgtgaatagtgctgcaatgaacgtgcaagtgcatgggtctttttgatagaatgatttgtttttggggggatatatacccagtagtgggattgctgggtcgaatggtagctctgttttaagttctttgtgaaatctccaaactgctttccacagtggctgaactagtttacattctcaccaacagtgtataagcattccctttactccacagccttgccagcatctgttgttttttgactttttactagtagccattctgactggtgtgagatggttttgatttgcatgtctctgataattagtaacgtagagcatttttccatatttgttggctgcttgtatgtcttcttttgagaagtgtctgttcatgtcttttacccattttttaagtggggttatttgttttttgcttaatcagttgtgtaaattccttatatattctggatattagacctctgttggaatgcatactttgtgaatattttctcccattctgtaggttgtctgtttactctgttgataatttattttgctgtgcaaaagctctttagtgtaggccaggcacggtggctcatgcctgtaatcccagcactttgggaggcagaggggggcagatcacttgaggccaggagttcgagactagcctggctaacacggcaaaatcctgtctctactaaaaatacaaaaattagctaggcgtaatgatgatcccagctacacaggaagctgaggcacgagaatcgcttaaacctggggggtggagattgcagtgagctgagattacgccactgcactccagcctgggcaacagagcgagactatgtctcaaaaaatcaaaacaaaacaaaaagaagctttttagtgtaattaggtctcaattgtcgatttttgtttttgttgcaattgcttttgaggacttagtcataaattctttcaaaagattgatgtctagaatggtgttgcctaggattcatatagtttgaggtcttacatttaaatctttcatctatcttgagttaatttttgtatatggggaagggtagtggttcagtttcattcttctgcatatggctagccagttatcccagtaccatttattgaatagaaagtcctttccccattgcttatgtttgtcaactttgtcaaagatcaggtggctgtaggtatgtagctttatttctggattctctattgtgttccattgtttatatgtctatttttatactagtaccatgctgtttttgttactgtagccttgtagtagagtctgaagttaggtaatgtgatgcctccagcttggttctttttacttaggattgctttggctatttgggcccttttttggttccatataaattttagaatagtttttttctagttctgtgaaaaatgacattggtagtttgataggaatagtgttgaatctgcagattgctttgggcggtatggacattttaacaatattgattcttccaatccgtgaccattggaatagttttccatttgtttgtgtcatctataatttctttttagcagtgctttgtacttctgcttgtaaagatctttcacctccttggatatctgacatttaaacagcacttgaaaggcatacacacagagaatcttccataggtatggtaaggtgatgctatgtgctcaccagaccaagttcatttttgtcaccaagagacagcaagactacatttcccaaactcccctgcagttagataatagccatgtgactgcattctggccaatggaatgtggtggaagtgattaagtcccttgtaggcctgtgttccctgcactgtcctccatactcctcttccctttccacaagagggaataagtctcattgcctgcttgaagcccaaattggactgtggtgagagtgagaataagcatgtgttgtcttaatcctctgacatttggggccatttgctaaagcagctactattctctgactgactcatggatatgtaaagtgttttccagtgtcttatctcacttgattctgacaagcaccctgtgagtttggcaggacaaatactgttctccctgtttgatagattccaggtctagagcccttacctttgtcacatattgcctctccaaccacagaaagtcacacctagagggcccccagtacccagatgcacctcctccagcctacacctgatcctccttacccctatgcagtataaaggctcagattgtttggaaaacctttgcaatcttactcctgtttgcaggcatggcaaaataacaatagccttagtgcctctgaaatattgctcttttgcataccctgaaataaatattttacttctcaggtacccctcttcttaactgtaggatgggaggactcca[225 bp omitted]aggctggagaatcgcttgaacctgggaggtggaagttgcagtcagccgagatggtgtcattgcactccagcctgggtggcagagagagactctgtctcaaaaaaaaaaaaaatcataatgtggaaagacaactgcagtcctggtcatcctgatttggggatgtttccttttatccactggatctgggaatcatctgccacacctttggagggggaagtcagtggtttcacctgcccagcatccctccctgcttattgcagtcttggtgggactgtgacccaggtgcctacttagcttcagccttggtgtgggcacaggaccaagctgcccaaggactgatactctctgtctctgtctctctcagacagcctttttcagagaatggccaggagggaaggacgcctggtgtgctctccaaggacactgtctatctctctccgtccttttggcagggctacccttcccctgccctttctggtgtctggtgcttcagcttttcctttgatgcttggccacatttttaaaaaatgaaattggccacatcagtttctattgcttatatataataaacctttattggtgcacctcttttcctaaaagacagcatggcatgtatttattgttataaagtgagtgcaaagtaagttggttttgaaataccttgatgtgtcacttaactacggcgatatgttccgagaaatatgtcacggggcaatttcatcattgtatgaatatcacagagtgcacttacacaaacctacacagcatagcctactacacacctaggctacaaacctacacagcgtgtgactgcactgagtactgtaggcagttgtcacacaatggtatctgtgtgtctaaacatatctaaacatagaaaaggtacagtaaaaatatggtactctcttatgggaccgctgctgtttataaggctcgtcgttgaccaaaacattgccaatatgcagtgcctgactgtatttaggagattttcacagagcttccccattccgagcctcccaccccaaaccccagctggttacagatgacccagaatattgtaacaccaggattcactggggttgcctgactccatggagctacttctgattggacgaggctctctgaggatggatggatggttggatggatggatgtcaaaagaatttatgccataggaatattagcaaccgagcagctgaccctgcctaggggatgcccttcccttccccaggagatggatctttaggggaattagagtctcagcgtggtggcctaaggtgtgatctttgactttccgggtgaccaatagatgacacacatcttggtgggggttggtcatctttccctgttgtcccaagttgacttagggtaagagtccaggctttgaaaatcagccggactaggccccactttctggctttgccacttactagctgtgtggctttgagcaaattatataacctctccaagcctcagtttacctctcagaaaaatgaggataatcatcgtgctagccccacctcacagaatccttctggcatttttgcgaagcaatccatactgaaatcattaagcctagacactggagctagactattgggttccactcctgatttgaccactcaatagctatgtgactgggggaaaagtacctgcccctggcatgcctccatttcccctcctgtaaaacgagagtaataatacctgtcttaggaggttaaccaagactaaatgagttcatatttgtcaagtgcttttatccctcctcaatccattgtaagtgctatataggtttttgttaaatagtcacaagtatttggcaatcaatcttggctattcttgtcattattcccattgtcaagctcagtgtccagcgagcagttggagccttgtgcaagtgtgtagatgtccaactctcaagatgttcttacatttaggcaggatccctgaattggggtcttgcagcctgtctatgtgcagggggtcctgccagccctagaggcatcctcacccatgagaagggccttccccactcggcagcaggctcactagacccctttccccccaccacactgacctgagctctccatgggagcctttgggtgtaggaggaggaggatgtggttgtctcgggcagcagaatagagaacaaggtggttgcttttctgcacagaggtggttctgcaaaataagaggtagttaattagtggaagcagtgggaaggtgcagaaagcaccttgggaaatggagaagctcctaagggacctaggcttctagcacactggggggaagtctagatgtatttaagaaaacttatgactgggtgcagtggctcatgcctgtaatcccagcacgttgggaggcca[135 bp omitted]gaggcaggagaatcgcctgaacctgggaggcggatgttgcagtgagctgagatggtgccattgcactccagcctgggcaagggtgagactggctcaaaaaaaaaaaaaaaagaaagaaaaaagagaaaacttatatagtgcttactatgtgccaggcatcactcttctaagcacttaagaaatgccaactttttaatattaatattaagcttatgaggcaggttctatctctcccccctccccagttctgcagatggggaaactgaaacacagagagggtaaatagctattcaaagttaaatagctagtaagcaaggaatgaggacttggaactcagaccgtctggctctagagccctcccttaagcatgacctctgtctgctccactgtgaccccagtgggaggtcctcccagagtctgctccccagagcgataaacccaatgactagaacgcagaggaactccaaataaacctaagagattgtttttggagagaaaacaagcgaacaaacaaacaaacgtataactgggaaagctaatctaaaaagagataacgaagagacaatattagaaatgataaatgtcatatatatatttctttataccaaaaaagaaaatctgagtcccctgtgtcgcacatggttttctaggacaataaaaatgactcaaaaggctctagaagagttagaaaaactgcttatatttgtaaccagtgaggaaatagagacagttgtcaaagaactagctctaagagagtggtgtctggctcagatagttcttctgataagttttttcaaacctacaaagaaaatatctacgttatttaatctgctccaaagcatggagaaagaagagaagattctcagtttattggacaaggccagcttcaccttgataccaaaatctaataaaggtagttaaaaaaaaaatggatcacgcacttcacacccattggaatgaccattttagatatacagaaaaaaaaaacaaaaacaaaaaaacaaaaaaccggccgggcacgatggttcactcctgtaatcccagcattttgggaggccgaggcgggcagatcacgaggtcaggagatggagatcatcctggctaacatggtgaaaccctgtctctactaaaaatacaaaaattagccgggcgtggtggtgggcgcctgtagtcccagctacttgggaggct[136 bp omitted]aaaccacaaaataacaagcattggcaaggatgtggagaaattggatttgtttggagtccccctgctttccagtcattgagtttattgctctggggcgcagactctgggaggatgtggtgcattgctggtgggaattcaacatggcatcgccgctgtggaaaatcgtatggcatgttcttcaaaaagtcaagcatagaattatcacatgatctaacaatttcacttttaggtaaagacccaaacgaattgaaaacaggaactcaaacagatacttgcacaccaatattaatagaagcattattcaaaacagcaaaatggtagaagcaactcaaatgtccatcaacagagaagcaatgaacagataaacaaaatatgatttatacatagagtggaaagttattcagccttaaaaaggaatgaaattcagatatatgctgcatcatggatgaaccttgagaacattatgctgagtgaagtaagtcagtcataaaaggacaaatattgtataattccactaatattagatacctagaataggcaaattcacagaggcagagacagcaagtatgacagaggttaccagggactggggaagggatgaaagggaagttactgtttaatgggtacagagtctctgtttggaatgatgagaaggttctggaaatggatagcagtaatggttgctcaatattgtgaatgtacttaatgccattgaattatatacttaaaaatggttaagatggtaaattttacatatccatattttaccaaaatagcaaactagaccacacttacatgcaaatatcgatataacatttaaaagtagatatcaactcattgaattcagcaatggattgtaattataatgtactacaatttcagcctactgacaatcatagaaatgaatattaaaatgagagtggcaggccaggtgcggtggctcacacctgtaatcccagcacttggggaggccgaggtgggcggatcatgaggtcaagagttcgagaccagcctgaccaacgtggtgaaaccccgtctctactaaaaaataaaaaaattagccaggtgtggtggcgtgtgcctgtaatcccagctacttgggaggctgaggtaggagaatcacttgaacctgggaggtggaggttgtagtgagtcaagatgtcgctactgcactccagcctgggtgacagagggagactctgtctcaaaaaaaaaaaaaaagagagagagtggcaaaaattatgacaaaagataatgacatccagtattggcaaggataggatatgagaaaatttccagtcatacatagttggtgagaagagaaattagtatagcctttctgggtgattgctggacaatatttatcaaaattcaaaatattcatacttttttgtctaagcaattcgacctttaaaaacctatctgaagggaaatattggacaaatggataaatgatatgtacaacagcattcattaaaacattgttaacaatagagtacaaccagaaaaaaaaaataaaggcacaattatagagtaccaagtaaataaattaatctgtgcaacaaaatactatgcagttataaaattatggtgtacatctgtattggctgaattcggaagatacaataccattta[218 bp omitted]gaggcaggagaatggtgtgaactcgggcagtggagcttgcagtgagccgagattgtgccactgcactccagcctgggtgacagagcaagactccatctcaaaaaaaaaaaaaaataataataataataataaaataataaataaatatttagagataaatctaacaaaacgtgcaggagccatatgatgaaaactatgaaatgctaattagataaatcacagaagacctaaataaatggagagaaatactgtgttcattgtttggaagacccagtatagttaagatgtcaattctcagccaggcacagtggctcacatctgtaatcccggcactttgggaggccaaggggggcaggtcacgaggccaggagatcaagaccatcctggctaacatgatgaaaccctgtctctactaaaaatggaaaaaattagctgggtgtggtggcatgcgcctgtagtcccagctactcgggaggctgaggcaggagaatcgtttgaacccaggaggcggaggttgcagtgagctgagatcatgccactgtactctagcctggtgacagagagagactccgtctgaaaaaaaaaaaaaaaagtcaattctctccaaaatcatttacatatttaaggtaattccaataaaaataccagcaggatttttttttgtagatacatataagtcaattctaaagtttatagggaaaggcagaggaattggattagccaaacagttttgaaaatgaataatgcctgagaactcacactcctttatttttatttttttttgaaacggagtcttgctctgtcgccaggctggagtgcgatgcgtgatcttggctcactgcaacctccgcctcctgggttcaagcaattctcctgcttcagcctcccaggtagctgggactacaggcacacgccaccatgcccaggtaatttttgtatttttagtagagacagggtttcactatgttggccaggctggtcttgaactcctgacctcgttatcctcccgcctcggtctcccaaagtgctgggattacaggtgtgagccaccacgctcagcttcgcactccttattttaagaattactataaagttattagtgaagggctagacacataaatcaatggaacagaacgaagagttcggaagcaggcccacacagatatggctaattgatttttgataaagttgtaaaggcaagtcaatggagaaaggagtcttttcaacaaatggtgatggaacaattgatcatcgatatgcaaaacaagaagcaaaaccttgacgtaaattccagaccttacacaaaaataaactaaaagtggacatagatttgaatgtaaaattcaaaacaataaacttttagaagaaagcataggaaaaaatccttgtaacctcatgtgaaggaagaagtttttagatacaataccaaagcatgatccataagaggaaaaacatgacaaattagacttcatcaaaatttaaaactttggttttatgacagatacctttaacaaaatgaaaaaacgggccgggcacagtggctcacacctgtaatcccaacatttgggaggccaaggtgggtggatcacctgaggtcaggagttcaagactagcctggccaatatagtgaaaccccatttctactaaaaatacaaacattagttggctgtggtggctcatgcctgtaatcccagttactcaggaggctgaggcaggagaatcacttgaacccgggcagcagaggttgtagtgagctgagatcgtgccactggactctagcctgggtgacagagcgagactccatctcagaaacaaaacaaaacaaaacaaaacaaaacaaaacaacaataaaataaaataaaataataaaataaaatgaagaagcaaagtatagacctagagaaaatatttgcaaatcacatctgacaaagaaaaaaaaaagaaaactaggataaataaataactctcaaaattcaacagtaagaaaacaaataatactccccaaatgggcaaaagatctaaataaatactttactaaaaaagatatgtggatggcaaataaacacattaaaaaaatgctcaatgctatcagcagtttgggaaaggcagatgaaaaccatgagatctcactatatgcctattagaatgactaagattttaaaatgagcaatagaaagtgctggagagcacacggaggaactgaaattctctctttttaaaaattatactttaagttctgggatacatgtgcagaacgtgcaggtttgttacattggtatacacgtgccatggtggtttgctgcacccatcaacccgtcaggaggaattggaattctcatacgttactggtgagaatgcaaaatggcacagccgttctggaaaacagtttgacaatttctcataaagttatgcgtcacttactgtatgatcccgtaatccctagctttttcctccagagaaataaaaacttatgttcacacaaacacctgctcatggatatatatagcagctctattcagaatggccccaaactggaaacaacacaaatgccttcagtgggtacgtgaatgagcaaactgtgatacacccacacagcagaatcctcggcattaaaaagagaactacgtgcaacgacacgcgtgaatctcagagacatgctgagtaaaggcagccaggcgctaaatcctgcatgccgtatggttccatttatatgacattctagaaacgaaaataaaaactacagggtcagaaaataggtcagtgtcagataaaggagtctttatctcttttttagtcaaacttttaattctgagataactgtaaattcccatgcagtggcaagaaatagcacagagtttctgggtaccctttacccagtttccccccagtgataacatcttgcaaacaatgttactgtatcaaaatcaagatattggtcaggcgtggtggctcacgcctataatcccaacactttgggatggtgaggcaggtggatcacttgaggtcaggagttcgagaccaggctggccaaaatggtggaaccacgtctctaataaaaatacaaaaattagccaggcatggtggcaggtgcctgtaatcccagctacccgggaggctgaagcaggagaatcgcttgaacccaggagatggagtttgcagtgagctgaggtcttaccactgcactccagcctgggtgaaagagtgaaactccatctcaaaaacaaacaaacaaaaaaccccaggatgttgatgtcgatacattttattccgatttccccagtttcacctgtacttgtgtgtgtgtcagtctcttaccttttaatgatacacactaaactacaaaaaaagtgatattacttacccataaacagtggggtcacaggtaatttttaatacatttctacattttctgatttcttaatcttaagtatatttgaccttattttttactgtgtaacagatggcacacacaaaagaagagagctaatatattatgttcagggacatagtaattacatgaacatctgggagcccgccagtcaatttaagaacgttgtgctgtgggtttaacgtaacctttgcacacccctgcctggagcacccttcccccagctttccccacagctggctccccctcgacattcaggtcttgttgtcaatgtcactgcctcagaggcctttcctgaacatcctgtccaaaatagccctccctgtcacactctagcacactctgattttattcatagcatttatcagtatggaaatttttcctgtcaggcttagttttcttggctagtcattagaatgcgaactcggcaaatactgggatggggcgtgtctccttcactgcagcatgtccagcatctagggcagcagccactcagtggacaatgaatacctattttagataaatatttgatgaatgaatgaaagtgaagaatattgccaaaagccacgtggccatgaaggatagaaccagggctagagcccagatctcaacctggggcgtggggtcatggccacttcccctgacgtccgcatgccttcctttcccctctgtaaacctcacagaacccccctctgtctttgtgaaataaaatgaacacaaacttctgtctggggcggcctgggttaataatgaacacggggcagcctcgaaagaaaagaaatctcacagataaagactaaaagagaagtgtaagataccaggaatttttgtggcaaatggagagtgcttctgggctgatttttaattgaaagtaaaattcccctttgggagg[135 bp omitted]gaggcaggagaatcgcttgaatccgggaggcagaggttgcagtgagctgcaatcgtgccactgcacaccagcctgggcaacaagagtgaaactctgtctcaaaaaaaaaaaaaaaaaagggaaagtaaaattctaagaaactttaccagtaactgtcagaaagcctccctattcatttgctcattccttcattcactcacgcattcactcatcaaacatttattcagcgtttctatatatttgtgcaggtgctgcttccttgctcctcccacaggagacctttgtggtcgatttcctgtcctttggggctgctgaccacaccagtgtgggggaagagcccccaggggatgagcttgcacgtagacaggaaatggaaatagaagcagctcattcttaaaatgcatcaacatcaaatgtgtcttcgtttcaggaatgagaagaattttttaggaaataaagc[132 bp omitted]tgcaacctccgcctcctgggttcaaacgattctcttgccttagcctccctgaggctaggaattacaggcacccgccgccacccctggctaatttttgtatttttagtagagacagggtttcgccatgttagccaggctggtctcgaactcctgacctcaggtgatccacccacctcggcctcccagagtgctgggattagaggcgtgagccaggcgcctggctgttttctcaatgagtctcaatggaagctcattgtatgcaccgtgccataaaacggtggcgatggcaggagctatcagtaggcgagggtagccctatcctacattgagtggctgttactgtttgacttctcatgtatgattcctcatttcagcagcaccagctgtgttctgcacttagtgggtgagtggaggctgcagtccagcccaccgctctgctggcctttttgtaatttactcaggcagggagggtgaggttttgcaattcatccatccaaagaggaacttgctgtaatttgtctactcagaggggtgcctctttctgatttgaacaaagtgccttctgtgttggctgcagccctgcctgggctgtgtctgctcctccacccaactgccagtttgctgaaggctgggaagccggaataagcacatgcaattgtcttgtatgtaaaatgaagaaacaaagcctgagaactgatcaatgaaaagagcatcaaacttccatccatggacttgcaacttctatttgctcagagggccctctggctgtcttctgagttcctggcagtgttttgggtggctgaggttggtgagtaaatcaaagagcctcttcagaacataatccatggggcagaaattgcacaagacctgagaggttagagatgaatgaatgagacatagtccttgccccctggggtgcgtggtctaccagtctgtcacctcataatgaccgcagggtggctgtacttgcccaagacccctggaacagacgtcacacacctatggcccaccattagcacactgaaactgtctcaccgccccatgcacgcagcatgcttgtgatggtttatgtgtcaacttgaccaggccaagggaggcccagatggctggtgaagcattatttctggaggtgtccatgaggctatttccaggaaagatgagcatctgaatgcagggagtgagtcaagatctgccctcagccatgtgggtgggcatcacgtgatctgctgagggcctgaataggagaagagggaggaggaagggcagatgtgctctctgtgcttcagctgggacatccatcctgcccttggacaaaatcagcgctcttggttctccagccttcggacttggactgagactgacgccgtcatcttccctggttctcaggcctttggactcagactggaattacaccactgactttcctgggcctctagtttacagaccacggattacagacttctcagcctccacaatcacaggagccaatccctgctaatacatccttttgttctctacccactccccacccacctcccagtctctctctctatcctatttgttgtgttcctctggagtggcctgactaatacaatgcttaagaagactaaccatttcgcagactcatgtaagagactctcagagactttgctctgtctagtatatttttaaaattcacttttcacataaaaaaccatgcgtatggtaaaaatctgaaaggcacagatagctatgcagtgaaaagccagactccttcttagctatcctctggcccaagggtccccaaaccccaggctgcggatgggcactgatccgtgggccgttaggaactagggacacagcagcaggtgagtggctggtgagccaccaggaccgcctgagctccgcctcctggggcggggggcggtgtgggcataagattctcatagaagctcgaaccctattgtgaactgcgcatgcaagggatccaggctgcccgtttcttaagagaatctaatacctgatgatctgaggtggagcagtttcatcccgaatccatccccatccccagccccagccccagcccccttccccacccagtaaacccctacccacccccaaaccccttccgtggaaaaattgccttccatgaaactggttcctggtgtcaaaaaggttggggaccactgctctggcccatcagtttccttccccaggagaagccacagtttttggaaatttgaatctgtggccaacatttaaaagtcatatttcatataaaaatcaagatttccagcttttgcttaaaataagtaactggaagatctagcaacaccagacccacaatctcgtgtggcaacaattagctggagttgacatgcagcttccctgtagaagggccatgtgctccccagggcttcagtgtccctattgagttcacaatggggactctgaagccgggggcagtgccaggcacaccacaccagcactatcagcctgtccacatcatcatttatgctacctattgggctcttgaaagcagacacgggccgggcacggtcacgcctgtaatcacagcattttgggaggc[134 bp omitted]tgcttgaatctgggaggcagaag[131 bp omitted]aagttgtggttcacaaagagaaaagttaattgcagaatgtctgaaatgggctgggcattagggttgccacacagggcccatagaagtctttcaacaaacacagtgcatctctgtacttctccctagcacccgatgccctatacagcaatcctcccttatctgcagtttcactttctgcaatttcagttgctcaaggtcaactgtggtccaaaaatattaaatgaaaaattctagaaagaaatgactcctaaattttaaattgcacactgttctgaggagcatgatgaaacctctcaccgttctggtctgtcctgcccggaatgtgaagcgtccctttgttcagtgggtgtacacagtgtgtgctacctgactgtaagccacttgctagccatcatggttatcagataaactgtcgtggtatcacagtgcttgtgttcaagtcacccttattttacttactcatggccccaagttgcaagagaagtgatgctggcaattgagatatgccaaggggatgcctaagacctccaatagtactgaacctggctgctgtcagtcagccaaggagaagctgtcaagtgcttccttgaagtgagtgaaaaggcgaaagttctcatcttaacaaggaaagaaaaaagtcgtatgttgaagtagctaagatctatggtaagaacaaatcttctagccatgaaattgtgaaggaaaaacaaatttttgctagttttgctgtctcagctgaaactgcaaagttatggccacagtgtatgataagtgcttcattaagatagaaagggcattaaatgtgtgggtgcaagacctgagcagaaatgtgttctgattgacagcagccaggttcagtactattggaggtctgagtcatcccctgggggtcttggagtgtgtcccctgcaggtaaggggactacgctattgcatttgtttattatctggctgctgtcactaaaatataagctccccatgggaaggggctccattttgctcactgttgagtccccattacctgacactgtttataccacatggaaggcccttgataaatatgctcgaatgaatgaatgtcaggcactcatatgaagacaaggcagagtcactgtcccaaagctactcttgggctggatgacagaaacaagtttgttgggcatggttgctacaataaatgacacaggaaacagagattactttgatgctcagaatactgcaaagaagacactggtcccataagaaatgtggagacagacacaatggtgagaaggacattgtgcctcactgacctggcagctacctctgtcacctgggggtggctgatctttctcgggccgtatcacggacagctaaggctgcaatgtttgactgctgcttttgtgccacaagggcaatgtgcaaggtactgaccaatcaaacatgccatgagcatgttttagatgagcatgtcagggctcatctaaaaattcctctccctccccccgtagcgcaagaatacgacattacaggacagcaatacaccatcctccgcccacagtcagcaagactcctggcagccaaaataggcagcgggaaagtggctgagggacaaatcccaacaacctgggagatgtcctgtggtcactccccacccactgtgcccactcacttacactgcccacagcattcactcatggtttcacttattccatagttcctgagcaccttctatgtgtcagacattgttccaggtcccagggatgtggcaataagttaaaatacacaaaatgcctgctctcagaaagtttgcactctagtgggtgtgtaggggacagaaaatcaaccaaataattaaatcgtatatgataagtgctataagaataaagttgggaaggggaaggaggggttctagagttggggaggggtgtgcagtgtctagatatagatacatggatatgtagatatttaaatatagatttaaatttaaacttttaaattttattgtcaattgatatattataattgcatatatttatggggtacaaagtgatattatgatagacgtatataatgtggagtgatgaaataaggctaattaacatatccatctaatacctatccttttcctggtgaaaacatttgaaatatttactctcttagtaattgtgaaatatacaatacaccattattaactatagtcaccctaatgtgcaatgaatctcagaaaccgtattcctcccatctaatgaaaacttcataccctttgaccagcatctccctatttcccccaacccccaagtgtgtgtgtgtgtgtttttttttgagacagagtttcgctctgtcacctaggctggagtgcagtggtgcgatctcggctcactgtaacctccacctcccaggttcaagcgactctcctgcctcagcctcccgagtagctgggactacaggtgcacaccaccacgcccagctaa[152 bp omitted]gagagatctcctgaggaggtgccatttgagtgggaacctaaaaaaggcccgacagcaagccatgcggtatctgcaggaagaacgctctaagcaaagagaatagccaagtcctgagttgcaagggtgcccagtgtttttaagggacagcgtttggggtgcaatgagtgggggacactaggaagatgttgggagacaattctccataggtttctgtttgtgcatgcctggtgagcattcttctgcaccatcttttcaaatacgtttgtatagcaaacagccttggaagatactgtccattctaggacagaagactaatttgctgtcaatataatagagataatgtctcctttcagggtaaaagttgggcaggtttgtttgcagctcgtcatgaaaatttggggtttcctaggctcagggttcctgggctatgatgcaacagagtccatttggattgggctccttgcggcgcccctaggacttaggggaaagggggacctataatcacaatgttcatgctcctagttgtgctgtgagtaatagagttctttgtctctgactctggagtctcatgtcttctgctggtgaccatgaagctgtggtgggctaacttgttagttctaagttaacttataactaacagatccttctaacttataacccaggtccttcacagctcttttttttttttttttttttttttttttagacagagtctcactctgtcgccagactggagtgcagtggcgcaatctcgtctcactgcaacctctgcctactgggttcaggtgattctccagcctcagcctcccgagtacctgggaccacaggcgcccgccaccacgcccagctaatttgttgtatttttagtagagacggggttt[147 bp omitted]aagggatgaatgaattgggattcagagagcattcttccttaaacacagaacatcagcactgaacaagtcgcaggccaggtgcacacacacagctcatcactcccttggggtacaacaagcccaaggactgaccacagaaccatagaagccttctatggacacggcaaaaagaagcaaatggggaccacctgttcacagctgctgctccctgttgttggtgtgagataaagtgggggtgacctcctggatagaggagaagactgaagtaagagggcttggaggaagatctgaggaagcctggctcaggttcagagtttctgaacctgaagattctgaacatgaagattccagatctgactgtcccttgtgcccccatccccccagctcaccattgctggcttctcggacaagctgttcagacagaagaacccaccacctaggcctccctatacctgcaggaataaagcctgggcagaaaagatgtggagcttccaggcctccctataccacagctgcaggaataaagccctggcagaaaagacggggagcttcccagggccacactctgtctgcctcctgtcctccagccactcctgtggcacagagagaggggacctgcagagcctgggtcacctgcctctgttgcctcccctcttctcccaccagagctgcctcgtgccctcagggtttcaggggcagctcaggcttgccagacgtcatagctgtgttttttttttttttggatcggagcgtgtggtgagtgagctggcagtgagggactaagggagtgagaggacagagctctgggtcctgagggggccccctcaacctttagcccttgcccccatgaggtctacttctcagattcccaaggagccgggaggtgagggtcctgctgccctggctggcccccgtggacaaggacaggcctgtttcctcagctgtgtctgcttctggctggaaggaaacacctggatatgaaagagccagtggggtgggggtgggggagcattgttcccaggggcagggaagcttggtgggatctgaattcaggtggggcctgaatgcagcagggaccagatggcgatgactgcagcttggcatctgcagccaccgtgtcagccgaggcgctttcgtggagacagtgtagggcctgcagcaggttctagtgtgaggcagcggggcatggtggccaggcaggtggcattccaatcctgttaatagggcaacttgggctgcttgcttaaaacctccgtgcctcagtttccctatcttaaaggggacctgacaacaacacctacctcataggcttgtcatgagactaaatgagatgatatttgaaaaccacatagagctaaataaataaatggaccgggccaggcgctgtggctcatgcctgtaatcccagcactatgggaggccgaggtgggtggatcacgaggtcaggagatcaagaccatcctggctaacacggtgaaaacacaaaaaattactactaaaaatacaaaaaattagccaggcgtggtggtgtgtgcctgtagtcccagctacttgggaggctgaggcaggagaatcgcttgaacccaggagacggaggttgcagtgagccgagatcgcaccactacactccagcctgcgcaaaagcgtgagactgtctcaacaacaacaaaaaaggaccggcctgcgagtgctccacacaccccctctagctgtgctccccccaacacctgactttcccacttgctttcctgcctctgggggtttgcacactttgctccccattgctgaggtgcctcttgcctcctctttgcacaccaggtcctcccttgagcctcagccaggcaccaccttccacgggaccctccctgagcccgcaccctgcagtctctttcatcctgcacacaccacacacctcctggctcgctgaggaccctgaaggttctgagttggtcactcgcagctgtgttcagaccctctttgcaagcagtcagcccttcaaggacagagaccaggcctcggtcagactctggcacacatagaagatactggatttgtgtataggaagagaatcagccagaccagcatgactttcaccaaattccccaggaaagtgatgggcagatgatgtcccagaaagggcacagactgggacccagatgtttcacactgagtcctgctccttgctaacccactctgcaatctttggcaagttgcttcatctccctaagcctcagtcttctgttctataaaatggcactaaaacacttatccagtcaacctctaaatgctggtgagaatcaaatgggaaaatgggtgtactctgcagcaccgggcatcaatcattagtcctattattaacagcatgtacaggattccagaagaaaggagagtccttctcacagggtcccgtgtcttttcatcttgtgaaaatgggctgaaacaatcttaacttggcagaattaccctgcagtgtctgaggtcacccttctcagaaagacggccctggcagccctgagcctggataaataagagccaggggtgtttcagcccccccaggggctccccttccaggtccctccgttccacccctctatctgttctgctcagatctgcctgcctggcgatctccatccaagccagcacttaccttggttcggtggcagcttctgggctccccaagtccttcagccaactccccacggtcctgagcgaggtccccagtcccagagaagcagatgtcttgggggagcctccacgggtgtctgtggtcttgactgtgctcttcagatctgcaaagaaaagctcgatgtctcacagctctgtcccctcctcttccttccccttccttgtggccctcgaagctcctcccagaatgcattttgctgtgaggatcctttctaaagaagcatgacccacggtcactggaggtcctttattctgatcgaatgtgaccaattttatggggcaggagggggacacctcccaagagactccctctggtgttgacgggggagggactgatgcagggagccctgacctctctctcaagctccagactcaccaaccatcccccacccctggacatggccagccagatgtccctcaagcacctccatctcaacaggtacaaaccgagctcatcatttctccctctaagcccacttctctgtttcctgcctcagaatcagcaacctcggtatcatcctaacgcctccctcttcctcgcctgttacatctaaactgcaccaagccctgtcaataggtcatggatcctccactttcttccatccctatggctgtcactgtttcacctgactaccatggtctttctcctgaaacactacaatagcctgaggtccttcaccccacagccaaaggtctctttctaagagtgaaacacaaatctattcatgttacactcctgctacaaccttcaatggctccttattactttaaagagaatggccaaactcctcagtgtgacttgccagacccttcttgatctggtccctccctaaactccaacctcatgctttatcccctcactccagcccctcccagaagtactgcagtctcttaactatccaggctgtgggaatcacttcccaacccttctcctggctcatcccttgtcattcattatttatcagagaagaacaaaaaaacaagcctaagaggcaggaggaaagtggagtgccagggatgctggcagaagacagaatgccaaggaggagacaatggtcaacgacgccaatgattgtggagaggacacaggtgaagagaatgaagaagcatctgctgtccttggcaattaggagagagcagtgctgggcaggaacagtagacctgctgggggaagttgatcaaccgcatggtgacacatttgctactttgtcattttctttttttcacattttgaagtcaaacactatttgggagagtctctgacacatttctagagctttgaaaaactcacagattctatgctgtcatcccgttgggcctaatgggtaaatggctctagagagtgacagattgctgacagcagggtttgagtgctggatccagctatgcctgaaattctggggctgaatctactcttggactgttcattgtacatgatccaataaattccattcttttttggattaagcctgttggagtttgtcacttggctcaactcagagagctttggggctgtgaagtcactgatcctttcccgtaggggcttgactaggttctatgctgacctttcattttgcagaggaagctatttggaaaaaaagtccagaaatgtaaatcatttactctattgctgtgccttcctcccataactgcttcttttctgtccccttcatgtgactgaagtcacattctatcttgcatctttgtattagcgttctcagctcacatgtctgccttgttcctccctcaatgagtcctgaaagagcaggggctagagtgttgttcattattccgtccatcacagggtgaaagagtgttaagagaatgcttggcttatttatgaagcaaatgggtgactgaacgaaggaaacgaatacgcccaggacagaataaaggaccaagaactcagcccctgcaggttccagactcagcagcagctgggcagtgtggccaccctgggcagcgcctctccttatcagccttggcttaactgaatcggaaatcacaagccgaggtcacttcttgtgggtgcactgctctctttatcatcagctgccatttctgcaactgcatttgctgtggtacccatagagggggcagcttggtgaccatagagagccccagagctgtcccttgcaaagaggagctagggtgctttcatttttgagtgcacacggctgaccgccagccaggaacaaaggacagtgggaggaggaggtgacaataggaaggaccaagttcccccacggaccccagtgcaccgtccctaccatcaccaaggcaaggcagcactaccccttttgccaatcccagccatgtctttcctctccagaccatgttcttaggatttgtttaatctgggttttccaggctgtgctcttaccaggtttctcatctgcaccagtctccaaagagcagccccctctttccctgccaaaaggcaaatgatccgtcagcatcagaactgtaaaaattaaggttccctgctttcactgtactagttcccagatgacctggtcagctaatggaggcaaagaccccccagaatgatcaatgcccaagatacagaagcagaaggcccaccatctattgtcactccccttcctcctcctccttctgccaccctcctctgccaagtgagggtccccactcctggtgacccttctgggcatagctgcaatggcctctcttcaggttctcctatctcagccagggtgtttggaagtctgtttacataactcgccttggggttacaaagttacttaccttctctacagatgaaccactgtttccaatccatcctcatccattttctaatccattacaaagccactgagagctttaaacaaaaattaaatcttcttgcaactgtggacagagccacgggtgaggagggccaggtaccagcattgcggaggtctgcaggaccacagtattggagtcaggcaagaattacatgcttaggaaaagaggtccccagggtcgcttgtgtcctcacctgcagtgccacccaccgtgggagctgctctgggattattcagcatcgaaggcggcagaatttgtcatttcagttttctaaggaatccacttacataaaatactaataagcaaagtcaattttactaaagattatgtaggaggatgaagggagtgtacatcacacgtctcttggcaaactattcaaaaatcctctgtggatagttctgaggatcccgacgtccctcctccatgccatgccattggagcgggcagcctggaatggggtgggcttttgtgctttttcctgtctctcttctccccatgtgaccctgactcattagcgtcggttcctccctcctagatttttttcacagacatatccaaattgtcttcgaagcccattcagagcactgtaattccattctaattctcaactccccacttttctaccccaaattcatgactgccacccacacagatagctctctggttggcaggacccatttttagaaaaccgtgagaggtaataaaccagaaaagagctgttaggaaaacacattttgattcgtttaaacaatcacctcgtgagtcagctacagttacacagataggttaagtttaaacgctctcatccctggtggaggtgagactcgacacactgcctcggcacaggcagtacccaactgcggggcacctttgcctctggtgcagtccctccagctcttgcccacggcccagaggcaggcaggacagcgtcatgctctaagccactggttcgctaagggtagtccctggactggcagcatcagcattgccctggaaatccgttatcaactagtactgtctgctgtggctgtggaaagggaggaacagtgcacacctcgggaattttccatcctttacttccagcagcgttatttggcagagtgcatgcagaatcaggactaattggggtgatagaagaagcggatttatgcttcatatccaaccagtcaccttctcagctatttttcttatttttggtggtggtggggaagtttttattttaaatgccatcaatgttctttttttgttaagctgtaatgtttaaaaaactagtcaagtaggccaggcacgatggctcatgcctgtaatcccagcactctgggaggccgaggcaggtggatcacctgaggtcaggagttcgagaccagcctggccaatgtggtgaaacctcgtctctactaaaaatacaaaaattagcctggcatggtggccggtgcctgtaatcccacctacttgggaggctgaggcaggagaatcactcaaacctgggaggcagaggttgcagtgagccaagattgtgccattgcactccagcctgggtgacacagcaagacttcgtcacaaacaaacaacaacaagaagaacaaaaactacttaggtaatccataaatatatttccattataaaaacactcaagcattgtaggaccctaagaggaaaaaaggagggtctctctcctccccctcctcaatttctttaccctcccacccagtgataaccatggtaaatagcttagggtagtttatacatgtgagcaccatacaaatcgctctttaacttgctttgtttacttgaagatcacgatatattggtacataaggatcaaccacattcttttcttacatttaaatgtacatgtttgtttggactagttacacatttacagggttcgaaatgggaaggacacagagaagatcagtcactccctcttccgaaagctgcccttcaggtgaagaaaaccttgtgacctcctccttctcttttgcgggtgcaactgtcccctctcccaaactccttggtactggcagctctgtgatgaggtgagagggcagacactttggggttgctgtggagggcggggcctggtctcttctcatttcccctgttctcatggctgccttgagagggagaccaagtggacccctgcttcctctccctctgcccctaataccgcaggttcctccttggacaggcttttgctggtggagctgagctggggaggtgttaggagtctcttcatctgcatgatatgcatatcaccctctccattttctttttccaaatgaactcacaccaggaagtggaacaaatcaagatggctggggtcaaccaggaaatcagtgagaaaacgcaaagaccccaacttgcattatttatgcaaattgcctgccctccaaacatgtgcaggaccacacacccactcatgtgcacacgcacacacacacacacacacacacacgcacgcatgcacacactgagctacacccccaaaagtaagccaggctacctggctgggccctcatcctggcacgtgcctctcactctgtgtgaccctgtgcaggcctctcccagtctctgggcctcagtttcctcctctgtaacctgaggggctgcagattgggtttgcaaagccctcctcagctttctcagccccaaaacgattctgttctggcctcagagactttcggctacagttttgctcagagaaggcctctggtccctggttgcaagggccccttccttgggtgtgtgggggtgggggccgctctgctccctccctcctcttccccagaggtctcgggggacccccttcagtctgctctggagccaggagcgacattcaccattcaccgagggcttccttcctgactgccctccccttagcagtggtccgcgcagaccagcctggagtcccgccaacccagtctggccccagcttcctctcctcctctatgccccctccaacttttccacccctgccactcccaccattcctgagggtgtgtgaacacagcttctattttgaagctatcagagcgtctccagcgttccattagaaacgaagccattcttctcagacatctgtgtgatccttttcatggcctcagcttacccaccacccacacgagaggttccagagagcagcagagattagtggttaagcgcagggactctggaccccacctgtctgtgcttaaatcctggattcccctttttactgtctctgtgagcttggacaagttacttgtctctgcctcagtttccctgcctgtaaaagggagcataattgtacctacctcatggggctgtggcacaaatgagttaacgtaagcatgtaaagcacacagagcagcgcctgacacgtgctcagtaagtgctgaaagtgtttgctgagaggtcagttcactcgacgcagacattcacaggtgattctctgtgcaggttgcaatgactgagacgctgcacctttgagctggaaatatctgagatccttcgaacaagcgccatttcttcccactccccccgtgcaaagagtggcagacacacgtacctgctgtgaccacagccatgtctccagggagcccacactcagagtctccggggctgtggtccgagccgggacataggtgtgcctgagcacagaacagagagaaacaagctggcacgcctggggacagagtctgccacctgcctcactttgcccccagagggatgggggatggcaccctctcccaggaggcatttcctttaccctgattttactggtatggttgggggaagaaagagaaggattcagagacttggggaaaggaggaagtggattcttcctcaagaaaatgggggagccctttccccagggaagctgtgaacattaccggtgctggagtgggtggcagtgtggcaatgcgggaggggcagtctgaaggcccagggcaggcaccaggctggctgggtccacacagcatctcgggtgtgcctggagccgcaggggctgaaaactgtgctgcttctgctttgggcagacagggggctgcgggcttcttgccctggaggctgtgggagagccctttccccggggggaggcatgactgggatgccagggacttcaaggagaggtctgaagatggtgatagaccactaccttccggcccctagaagaagctcccagctacctgaggagaacaaagaggtgtaagccattgtgtctggaggagccccctctcggtaaggcttctgctcacagggagccctgtgttgtacctgagcgagttagagaaaacgccacactttgagatgaattaagagtctgtttatagttagtgattattaccagtagttctttaatttacgggtcttcataagatgtactgtacaatgctcaattgttatgtcatttaaagacatcaggttcatctgtttactgagctagaaacatagtatgtagtttcactttttaaaatgcaacagctgtgctgaaattttttttatcattaacacttgaagtaataaaataggcttcatttatttaaaaaaaatagagtccgtttatttagccggtggtcaagagacggctaacgctcaaaattctcttggccccgaagaaggggctagattttcttttatactttggtttagaaaggggagggggatctagttaaaacaattttacagaaataaagtaggcaaaaagttaaaaggataaatggttacaggaaagtaaacagttccaggtgcaggggctttaagactattacaaggtgatagacgcggggctttgggcgttatcaatcggacgaattcctgggaactgcggatatcactcgccacagtatcttatcagttaattgcatttttggatgtgctgggagtcagcttgcacaagttaagtcctcgaagaaggggctgccagtgaaagagccaagatggagtctgtctggctctcttacctaagggagagtcaattcaggtggaaccaaggctaggtgattaaaggaaagagggagagtctaaaaacagggttagtaaaaacaaggttgagcattacacctgaggcccggtaggctacctggactacagtctcagcagcaccatcccctttcacattgcgtcccctgatgagccctacacactccccggaaagtagacactgtgtcattttcacaggcaaggaagcgaggcttggagacatcgggaggcggccagggtcactccaagggtgaacgttcctgctcctccctggcctccctgtgatccgaggtttagcctgagagagtgccgtatccgacaaagggagcagaggaaatgtaaggccacaggggttctgccaggtgcaggaaggaatgatggaactgggggccaagagagcgctcccttctacggtcccaaaccctgagacccgcagtgcacagcttgattttggtcccctaactgaggcctgcccagccttctaggaagcaggaagtggcaaaaggagacacctatctcctcccaaagttggagaaatatacccattccagggatggcaagaccaggaggtcaacatgcctagggcagaagtaattctgctgtgagtagtgggaggtgagagtctgcaagtttatggccagctcctgagctcttggtgaggtaccatgcggaggaggggccaccttgaggaggaggatggggtgctgaaaaggacagcctcctcctttctcttcatctgccaacagcaggacccaatggggattctagtttcagtcccctacctcggcccctttcctcagtgttcaatgactcggattacaaaagctcatggactggatgagacattctggctcagagcccctttagcctataaccacttggcccatggattcgcctacagctcatggtgatagtatccagggtatgtgtctgaccaataggggatccattcttaggtcagccagtgatttttgtgaagtatggtttaaagaatcttctgtctgggcgtggtggctcatgcatgtaatcccagcactttgggaggccgaggtgggtggatcacctgaggtcaggagttcgagaccagcctggacaacatggtgaaaccctgtctctactaaaaaaataaaaaaaattagctgggtgtggtggcatgcgcctgtagtcccagctacttgggaggctgaggcaggagaatcctttgaacccgggaggcggagtttgcagtgagctgagaatgggccacaatgttctatcaatttcagtaacatcaaatttgttaattgtgttgtccagatcttgtatatctctattaaaattttttgtctatgtgttctatcagctattgggagagatatgttgaccactgtggttgtggagacttctagttctgtccatttttgttttatatttatatttatatacagtttatatttatatagtgacatgtatttatatttatatataattttcagttgttatttggtgtatatagctttataactgtaataccttttgttggactccttaatctttatgaaatgttcctctttattttttgtaatgcttctgctgttaaatctttggatattagtgtattgacaccagcttttttggtccggttttgcatctttggatattagtgtgttaacaccagcttttttgatctggttggttttgcatggtgtgattctttccatccttttgctttcaacctttctgtgatgttatatttaaagtgtgtcccttgtgagcagtttataagttttttgttttgttttgttttgtttttgagatggagtctcgctctgtcacccaggctggagtgcagtggtgcgatctcggctcactgcaagctccgcctcccgggttcaggccattctcctgcctcagcctcctgagtagctgggactacaggtgcccgccaccgcacccggctaattttttgtatttttagtagaaacggggtt[132 bp omitted]gtattatcagacaattctgggtgtgtgattccaggttagtaggtttgttttttcccctcatactttaaagatatcatttcatcatctctggcttccattgtttctattgaaagagagagttctcagtttaattgttgctactttgaagataaagtgtattattttcctctgtctttagtattttcttattacctttttttctttagaagtttgacagtaaggggtgtgtgtgtgtgtgtgtatgtgtgtgtgtgtgtttaagaaaaaactgaactccagattgtattgggattttaccagtttttggattaatgtttcaggatacaagccagtgtctactgcttatttttcaggtttactccatctctttttgtttctcagtctttccttattttttgtgacagtaagagagtactggtcaggttatctggtcccatagtctgggtttatatgatcttttttactcttgattagactggagttatggaaagaacatcaaaggtaaagtgcacttctcatgtgattttgtttttttcttgtgtggagattcctgtgtcaaaattcctgtgcaaaatttgctgggtttattaagtctgtgggttgatgtgcttcatcagtgttagccaattattggcagaaggaatattgttcttgttccaggttccattcctaggaggcatcgcgtgtctctgcttgcctctcatgctggtccaatgtgtctgaaagaccaacgaagcagatctgcacccatcctgcagcttggagccaagccactctgagcccagcctagatcaggtggtccctagatgtcctccagatgcatgagcaagaacaaatgatcggagacttagttccctgaattgaaggtatgcttcattgtttgcaatagccagctgatgcagagctggaacagctcacagttctttctccctccatcctgaatagtgttctggcaacctggtacttacctccctctcccaagccacaggtgtcctctaccatccctccacttcttcttctctctttccttatcacccaagtctaaaggcagtcccagatccaaagggccattattgagctctcttcccctcctctcagctgcatggtaggtccaggatccactgtgccacccatccgcagcaacggcctcaggcccgtcccctccctggagcttggggtacaggaaacagatggatatatgggtatatatttctcaagtgaagtagcacaggaaaccccaaatgctgagtccttaggtgtaggaatttttgttctgtgggtcagtgagtatgatgaggcttaagcagaacagtattggggaaaattttcacccaaatatattttctatagggtggaaaattacaaaaagagaaataaaacaatcccctatgaagcttctttctggtataaataaaatgatttatataaactgtccaactagcagggtcatgcagcaaagtaactactggtcattaaatataggacaaatcaagttttatttgacaataatattaaattccactcattagttcctggacatctgttgatcacataataagacaacctgcccatacagcaaaaacatattgaagatacatggcccgccactcttctggagcttagagcaagagcagacattaagacaggggagagacggccaggcaaggtagaagctggctctgtccacgtctctcaagtcatgagtactctgggctggaatttcacgtaaggccttttgggcataatgaattaggaggcggggaagagggactttgtgcaggatacagttcatgcttccgtggctactttctccacatcagtccagatcctcgtcttgacttctgccctatctctctagcccatgtttgcttccagcttctcaaaccacttcaagctggttgctttgaatttcagactctcgtgtcctatcctaggctgaccatttcccatgcaccagtcccatttcccctgagtcgggcactaagctctgtgaggccagtcactccatcctctgttctgggatcttgcccaggtgccagaagagtgccagtgaacttgcggatatggaagattgtacacgcagagtgagatgggagtgggagggccaatctgatacagaagggggtgaagggtagggcccctgagcagcccaccccttaccctgacgaaggcaatcctcctctggaatgtctcttccctcttcagtctgggttctgcctcagccacgaactgggaaggagtgaggaacatcccaacggcaatgagagtatcccagtgactccaaacaggaggaatcagtgttcagaaagtcaggcactaagctttactgaacacctactgggagctcggcactgggctaggtgctttgcagacaatttaaccttttaaggatgtcttatttccaccccaactctccactccattttagtgctggagaaatgaaggcttaaagttaattaacttcctctagtgatttagctagaactgagctgctactaaatttaaccctatcctgtcttctaagaatctcagattccaaaaggagatcaagagagaatctgtgccgggttctgagagtagacaggtccagcgttagtgctgtttttctggagactcaggaaacttgagagaaattattgaggtgtgtgcgtgtgtgtgtgcgcatgtgcgtacatgcatgccatgtgtgtgtggtgtttgcagggagaggtggtcttgaagtagagaaatgtttcatccacatttcaatcacctgagccccacagaggaggggactgaactccagacatacagggtcctcaagtctttggcaaagtaaggggtaggctcagccaaggttgagagaaaaggcccaagccatccccctgagcaccagagcctcagatcttccttctagaaaggatcctagaccatgctaatggtcagggacttcagaggtcaatttacccatccttctccttctactgccaggaatctaagaggctatggggtctggcccttctctctctgatagctgttgctttcccagaaccctgaggccccagaaaccctctactcccagcccctgctcattgcaggacccacagtgggactatggctctgcacagggccattcagttctccacagagagggactgtcctggaggggtggccgaggaggttgccccagggcttctgtccagtctggcgctgggcccacactagggcagagctccactgaaagtcatgatgggcaggcagagaagggagcagagatcaggtgcggcctgggccggcaggtcaggaggcgtctggggtggtgaggagaggtcgctcttctctggcttgtagcacggtgagacctcacatctgtgcagcagggcaggggccagggatcagagcaggcccccatccttccagctccttccaggcctctgggttggtgggagcagaaactgctcccctccctaggacccccctttcctacctgactacactctgcaggatctttctctcatcctggtccaggcacacagcaaaggggcagctgttggagccgatgatctgcaccttgtccactttgatctgcgatgtgctaatctggaaggaaggcccaggtcagccccaaatccctggccatccaacactgccagcccctggcagttccttttctcagaactgcccatccacttctaggggtgtgggagggcaggggtttgtctgactgcgctccagggttaatggccaggtcacaggagggagcctgaggcctccatcagcccctgcctcctctccagcatctggaagaagcaagtgccccctgaggagacattgccctgcctgctgccctcaccggagcagccccaggtcccctgatccagagcctgctttctttggtctcagagtcttaggactctcctggcacccaccccacaacttttccacatacacgcgtcctctcacagggcacccctacctccccgacaccccgcaacactccacacctgtgtgcatccccaaatcatacccctcaccctgcctctcctcccccacctctcctctctctctcacacacacacaagtatgtacacacgggtgtgtatgtgcacacatgcacacacatacatgtgcacacacacgtacacacatacgcacatgcacgctccagtaagtctcttgagggtatggctggaaggagagggaagcccgtacctggttaaagcccttcttggatttggagttctgccttttcaccacttctgtcaggtttagcgtcagggcctccatgctggaatctgaggggcaaggacactcaggccaggctcagagcacctccctactgcacaccccacactgaccaccccactcacccagctcctcctgcttccggcaggccttgttgaggttcacggaggtacagaccttctccaggttgctccagcgacttcgtccactgatggccccctggaaatgcagtgtagccagaccctctgagtccagaggccccggtgcctgctgccttctctttgaaggcccatcagtgacagggggttgcctctagttagcatatccccagaaagccctctcttattcaccagggcccctgtaccaccctggatagacctggatgactccagggaagagctcacgtcactggcttggtctaggggtcagcagcctctgtgaccaggttgaaaggtacaagagctgagagcacctgcaggggtggtcctgaagctctcctgccgggcccagagtgaagaagggttgggcccacagacatgctgtttctggcagagccagacctgaaccccctcttcaagtctttgtgtgaatgtctctgtcatcagggacctccatgttgttaaaccgaagaacacttcttggtcctcagcttacttgaccttacagttcactgctctcccctccttgaaaacctctcctgggctttcgtgatggcaccttcctggtttttctagcgcctctctggctggtgcctctctgctttgctggatcgctgccctctgcccgccattacatcatgaagggctcaaggttctccccttggtcctctgctctttgtattccctgcttccccccttcaggagtctcctccgtgacctttttccattagcagctgtccacccatcttcatattcaccacaaagtcaggcccgttcagccagccgtctattctcactgtctccttatacctctcaaggcctctcaacctcaataatatgtcccgacccaaactcaagctcttccccaactggaccccggcctcttcctgtggtccccccagagaagatggtgctgccagtcacagaggagtgactccaggagtctggcctctcctttcctaacccatccatgggccctgctgattacatcactcacatctgtctcccattcctttccagctctgccaccactaccctagtgcaggctgctgccctaatttctcttctggaccatggcaacagcctcctaactggccttcctgcatcacttgtggacccttcctatctgtcctccacagagctgccagagggagcttccaagcctcagatataatcatgtcacaggcattcccagccccaccacaaacataagcccccttaatggatatccactgctcttaggactaggataaaattcctttcattgggtcgggcgtggtggctcatgcctgtaaccccagcactttgggaagccaaggcaggtggatcatgaggtcaggagttcgagaccagcctggccaacgtggtgaaaccccgtctctactaaagatacaaaaaattagccgggtgtggtggcgggcacctgctacccagctactcaggaggctgaggcaggagaattgcttgaaccagggaggcggatgttgcagtgagccaagattgagccattgcactctagcctgagaaacagggcgagactatgtctcaaaaaaacaaacaaaaaaccacaaaactcctttcattgcaattaaggctcttggtatgctggtcccccatttctttagcctcacctcagcatcatgttcccaccagctgtctctgctccagcctgggggtcttctttcagagtgcttcaaggtgttcacactgcctcccaccacagggcctttgcacatgcagtttctgctgctgtgagagcactcacctctcttctcagcctaattaattcctggttttccctccaatattaactcaggtgccttctcaaggaagccttcactactaactctcctgactgggttcggtttgccacttaggaacatcccgtgtccctctcctcatccatgtgtcacagttgtaattttacatcgtgtgcatcatcgaaccaatgcctaccacccactccagggggccagcaggtctcctgggaccacgtctgtcctttgttcactcttaggaaggctccagggcctagaacagtgcctgggctgtggaagacgtctagcaagcacctggcatgtggctacagtgagtgtcggtgcctcctgcccacctccttcactgccaaacgcactgcagccccaacaccaccgtccatctgctgttttattgctttgtcatcacttgccgctctctggaattatcttggctatttctttgtttcctcgtttcttgtctgtctccctcctctagacaagctaaagtgaggcctaggcttccctgctcaacccctcttttcccctgcccagcacagaggcagcatgggcaggtgctaagaggatatctttggaatggccgaaggaagaagcccacctgtgaggccaagcttccctcagcctggaccttgggatgcgacctgctcagagaactcatgtcttctggcatgtcatggacagccctccacctccccacagctctcctcactcctttctcacgccaatcccatcttgcatgcagcctgccaggcacactggccccccgagaccctggcttctccctgaggtgcctctggaaggcttccctttccccctttcagccccagccctgtagccaggcccagcagacccctacccctgggctgctgctgagcgcattcgggtgggggcagagaacatggtgggagagaggctttggaggccaagaagcacagagatatccactccttcccttctctgcttctctcagcatccaggggagcctgctgcagccttccagcgtaaagactggggcccaggaacacacgagtccagctctgggtccaagctctggcggaggaagtatcagcagcagatcctggaggggaaggagccccagcacgggtcttaccttgctgtaaataatctgtagtgttagaggaacagcctcccggtcgccatcgatgcccagccgcttgctgccaggacctgtgccacacacagacagacccttcactacccctggcttccccggctcctcacgaacgcagtggccttgcctccctgggccttacctccccatcccctaccacatggaccgtgactccctagggatctgtctcaccaaggccctgcctctctctctggctccacgttctggggatctccacctcctcagtgaccccatcactccagggcccatctccgctgtgatcacacattcccagggtcctgcctctccagggccccatctccgctgtgatcacaccttcccagggtcctgcctctccagggccccatctccgctgtgatcacaccttcccagggtcctgcctctccagggccccacctcctgggtaaccctgcctccccagggcccacctgctgggtaagcctgcctccacctggcccgacctcccatgtaaccccccttcccatggtcctgcctcccggtaaccgtgcctccccagggccctgccttccaggcaaccccgcctccccatggccttgcctcctgggtaacaccgcctccccagggccctgcctcgtgggtaactccaccttcccatggccctgcctcccggtacccctgcctccccagggccccacctaccaggcaaccccgcctccccatggcctcgcctcctgggtaaccccgccctcccatggccccacctcctgggtaaccccgcctccccagggccccgcctcctgggtaactccatcttcccatggccctgcctcccggtaaccctgcctccccaaggccccacctaccggacaaccccgcctccccatggccctgcctcctaggtaaccccgcccccccatggccccacctcctgggtaaccccgcctccccagggccccgcctccccatggccctgcctcctaggtaaccccgccctcccatggccccacctcctgggtaaccccgccctcccatggccccacctcctgggtaaccccgccctcccatggccccgcctcctgggtaaccccgccctcccatggccccacctcctgggtaaccccgcctccccagggccccgcctcctgggtaactccgcctccccatggccctgcctcccggtaaccctgcctccccaaggccccacctaccggacaaccccgcctccccatggccctgcctcctaggtaaccccgccctctcatggccctgcctcctgggtaaccctaccttcccgtggccccacctcccgtatccctgcctccccagggccccgcctaccgggtcacccagccaccccatggccccacctcccggtaaccccgtctccccaggggcctacctcctgtgcaaccccaccttcccatggccccacctcccaggtaaccccacctccacagagctccacgtttcgcgtcccaggccccgcctcaccgtctgtctctgctcaggcagtacccacctgacgccttgatggcacgtgtggcagcggagtgacccagctccaaggagtggatgaagatctctgtcgtcttctccccagtgatgaaggtcagctggagagggcaggagcatgtacatcagtgtgaacctcctggaggggcccatttggctcctccagcatagacctgctggctctcccggggcaggggtggggccttgcaggcccggcaggtggggaagaggcggttcggggcagggaggccttacctcggtctgatagacttgcagcagcaccggtctggcggcaaagcggcagtagtagagtagcatgtcagccaggatgggcagctgggttggggagccctccagggcctgggcttcagccttcagggactgctgtggccagagggaaggggcagccaagccagatgggtgggtggatagatggtaagaaggagcaagaattagggaggaagagagaagagagacatagaggcagccagtcagggggagctggtgaggtggaagcaggaagcaggggagggccggtgcccagcctccatgcccctcacctgacccactggcctccagggaggcttctggcttagccagacaaaggcgggagttgaggaagggggctgaaatctgaggtcccccggacccttctgagggccctcctccatcactgcagtgaccccagctctcacactcagtgtcctgagttcaggctcagtcctgcttctcacccacactccctgatcttttccaagagggcccaggtcctccatgggggcctcaagcctgattccctaaatccagggccttctaagtgaggctgggtgactgcagccagtggaccctgttccgcaaccacggggccacttacctggcacaggacttcagggggcaggtgcatgaggcccagtacattgcgctcataccaggggtccagcatgccgaggtagtgggagatgtcattggtgctctcctcccatggggtggtgcccagctcctagggcaaagaacaagagtcatcatcccagctccccaggaggcctgcccatcctagctccagggccttggatggcacctgcagccccatgctgagcttctccctgcccttggggaagtatgacaactttcagtctttgtcatatggcaaaatgtcatgtccaagtgcagggagtgagggccaggcagggggaggtgccctgtcaacacaggtgcttgctttccatgacttccaatcggcttccttcaggtagccagaactctactttccccgaccattggcccaggctggggacatactccagggctggcgtgcctaggggagtctgtcgggggtgagggcgtctggctccgagggggtggacaggcaccagggctggtcccatgacttcgcttcacaggcacgtagaagaactgaagtttgaagaaccgtgtgaggagtgggcgatt[137 bp omitted]cagagggaaaccccatctctactaagacaaaaaaaaaaaaaaaattagtcaggtgtggtggtgtgcacctgtaatcccagctactcgggaggctgaggcacaagaatcgcttgaactggagagccagaggttgcagtgagccgagatcatgccactgcactccagcccgggcaacagagcaagactctgtctcaaaataataataataataataataataataataataataataataataaaataaaaataaataagggaacttttggttcctctggggccctaagcctcaggccccagattccaccagcacaacaaccctgttacccagggcagagggatgctccgcattacggctcttaccgaaggttgctgtacgcccgagccaccttccctgaaatccgatcggagccaaagaccacaacacgtagcgtggaagccttgggatcctcatctccactcaggaaggggcggcggcgctgggggcgtgaagcaggggccagaagccagctgggcagctgggtaccgagtttgggctggggcagggagcgggagcgctgggcccgggaagggggtgatactggttcgtccagggggctgcagaggctccctgcccgcctcaggggcagggccgtgtccgagctgccctccaggctccgagagtccctccgcagtaccagctggctggtgctcttgaagagtttatagatcctgatgaacttctgcccaggcctgcggtggcctcggcgttcctggctgccacgcctccaaggccactcggaggagctctcctcgctgtcctccacgtagccgctgtccatgccatcagagaggcctgagacaaaggaagtcagcagatggcgcgagagggccggccccgaggcctgggaggatgcaagggacaaggtggagtcatgggacgccaaagagctggtggagagcagggaatctctctcggcacagtgcccgtcagtttccaagtcctcctccacctcctcctcctcctcttcctcctcttcatcatctcccaggatccctggctggagtagctcctgttccttgagcaggatttcctgcaggatgtctgcagggaagcaaggccagcactgtctgggcgtctgggccccggatccccttctatattccctttggaggggagacagcaggactcagggccagcccaggactcctagcactgcccccttgctctgcttagagcctgctcatgtgggagagctttggggacggggtgggagctgcatggacccaggaccagaaacacagctcaggcagtgtggggcatgggtgtcaccagggccccggctccttaccaaagctgtcctggctccagctgtaggtgtagcacctggcgacagggatggggatggtgtggagcttccctggttttgcagtgtctgtaagaacagggaggataggagaagagggctgggaagaggccttggagattggccagtccagtccccttgccttggagaagagaccagagatgggacaggatcggcacaaggatatgtagctggataggctgaggctgagttacagccagggtgccaggctccaagccagaggcccttctttcaagcacaccatgtagatggcatgccctttatgagctgtgcgaatgtggccaaaccacaacctctgagcctcattttacaatgtgcccatgggagaataatagtactagcccagaaggtttttatgaggaatattgtaacagggaatgctaatggttcctcaaagtctgtgctcccttctatggtactggagtcatagagacgatgtttcccaggctcctttggggcaagatgtggccacgtgaccaaggcgggctcaaaggaacatgagcggaagtgatgtgcccagcttctgcatcaccttcaacagaaaagcccagcctttgccctcgtaagcactctcttttcctcttcccacaagctgccatcatgatagcacccccaccctgcccctatagacaggaatgagacaccctaggggatggcagagcagtgagatgctgaagaagctgagtccctgagtgactgtgtggagcagagccaccaggcccgcctggaccgtgcaccttgggacctagaataggccatggggaatgtgggagaaccccattctcccaagagcctcacctaacaccccagggaagccagctttttctcccaccgcctgcagcttggtcctgagccaccgccgggcctctgcagcatccccgatgccagatgccagctcctgtgcctctgcggtctccgtgaagatgtcctcaagctctgccagggtcttggcctgaaaccccaggaggagatgggctttgctcctggaccgtgagctagctgtccacctgttccagttgctagcttcttactgagggaggcagtgatctgtcccctcccagcctcatcacccatctcctacccacagctggccaggcagccaggcctctccctgcccttccattctcaggaaatggtcaggagagaaagatccagagccacggcactgcagttaggagggacttcagcgctcctcactgtaccccatagaggggaaggagctgtgtggggtgacacagccgacctgtgacacctgtgacagagccaggcctagatgccaggtcttcagcccaaagctcattctcgttcttatggcatatgccatcttctgaggcaccagttatcagcacccagtcctactgcccaggctgccacccagctggttaggatccagcacaccagaaacaccctctatgaggtcagccctccagccaccaccctgccatgtcacctgggtgcaggagactaagtgtaccctggagaccgtggctgagatgaagcagggagagggtgctacctcctcagagaggtgctccaccagagccccaggccccaggtacatacctgtagcctgcagtgcaggcccgggacgtcacagtgggccccaaaggtggcctggaaggcgtgcaggagcagggtggtgtaggcactgtgaggcgagtgtccgggcgtactcagcttattggctacagcaaggaactcggcctgcacttccactgggttcagcagcagcacggtgctggggacacaggggaccggctatggcacccaggggtgcgcagcatgccacagtgcagccacccccctcgtgcctgctggtgctcagctccactgagaccagggcctcctcaagcccaggcagagctcgaggaggtgaccacaggaggccaggacagaagcaacagctccagggtccaggtttccaggggaaagcgtggggttcactgctgagcatttttcagctgttgttttcaaagatcttttcaaaattgaacttaattctttaaaactaaatttacttaatttttatataaacgttttttcctatgagacagctgagtggatgcaagattactcaaatgaggatcatattttaggcaaggtgacttgaagccaagcgatcagttttcagggggagctggacagcaacgtggtgctgtgcagtgtggtctggggcgagcgggacatgaaattcctcgtgccgtggggctgcatctgcccggaggaggggatgccaagtcagagtgcatcttcttcctgagcttatgagggacaccttttctaatcagcccaaagccatgatacaggctttcactggctgggaggggactgtgtgcctggccactgctacctcccttcccgatggatacccagattccctcttggtgccagtgtttacatttctttattatggaacctttctcttttttttttttttttgagacggagtcttgttcttgtcacccaggctggagtgcagtggcacgatctcagctcactgcaagccccgcctcccgggttcacaccattctcctgcctcagcctcccaaatagctgggactacaggcacccgccaccacgcccagctaactttttttttttttgtatttttagtagagacagggtttcaatgtgttagccaggctggtcttgaactcctcacctcgtgatccacccgcgtcggcctcccaaagtgctgggatcacaggcgtgagccaccgcgcccggctactatggaaactttcaaacataccccaaattaaaagaatcgtgggctctgaggcgctgatcactctgtttacagttaacaacgcacggctgttctcacttcccccatgccaacccctccatcactgcatgacctcgaagcaaattcgagccatggcggctttgtatccataaatgctttagtatgagctgcatgtgatgagagctcttgctctctcaattccacactgcgtttaaacccagtgcaaaggagcaccacgcagggcagcattccctccacactctggggacgtcggtgcccggggacagggcagagacaggactagtctctgtcaaagtccccatcatttgggaagaaactcactttgatttctctatctgtaagaaaaaggaggtgggcttgtataagcagccccttacaaccttgtaacgagcccagccgagcccctgccctcaccagcttgcataatttctctcccgaagaatttatcatcattctcaatttacagataatgaaagtgagaccatctcccaactgtaagctctttctacaaatctctcggtgcctcacttcccttatgtgaaaaatccctttctcacggggttaacgtgaggattaaatgagtcagcacatgtaaccatgcttaggatggtgcctggagtccgaataaaggtctaaagggctttgatgattcttcatcagcccacctgccccagctcccccagaggaatcttatttacttactaaactacaacattttagcatcctttccctctgtctcaacatctatcattttgtttgtgtttgttttcacctagagggaagtcaagaagtgttgctcaggggagtgagtgggaagtgaacccctggggctgggaatgaggagggccgggggcctataatttctgaggtggtgaaggccggggtccctgggctcccaacatgtcaaggtgagacagcacccaactcttcaaggcctgcagagggtcctcctaatgggcaccccctctctagtgcttttcaaactgcaggtcaggacacaggagtgggtaatgaaatcatctggggagccaaatttgtttcttaaatgaaatagaatagaacagagctcatcctatgtaaccaggatacatttcatttcagctgtgtgtgtgtgtgtgtgtgtgtgtgtgtgtgtgtgtgtttgtgtatcaggctgtcatataaaatggatttttcttataggtcctggtcaaaaaagtttggaaacactgttttagtaacagacagaaggagattgtggaaatatcatgggcttctgaataagcctgagggttaaattctggctcgtacccttgctcgctgtgtgaccttggggaagttgcttgacctctctgacctccagttcctcatctgaaaataatgaaagtgggggaactgtgtgcctaacacctggcataattgatacagacctctttaagaatctggtgaaagaccgtcagcctagaaaaacacacctggacacaaaatatcaccagcagtgccagggggttcccagttccctggaagcctgtttgttgctggctggggtggacagggggtgggggcactggatgtttgagtgggggaggagggtgaaggtggaacagtgcaggggtcccaaactccctccccactgtttctccgtcccccaagagcactcacacggtggagctgcggtgactcctgatgggcaggccctgctcagccctcaccagtctctggtaggagatccctgtgggtcaagaagaaaagagttcatgggctgatcagttccttcagcatcgtccgtgtgcctcgtggggagccaagcactggacaatcaggttggaaattcccggatggagctcaggcgaacctgcagagaagctgttctgtggaccctccagggtgcctagcagtttgcttctatgcgtccttttacacctcacgagtcatatccccacctccacctccaacaccaaaactcggtcctgggcctcgctgtcctctggattcccgtggcctctctgactgccctcccttcctaagagctttccactccccttgtggctcaggtcccggctccaggcttggaggcagcctagctggagagaaagagatccagggtgagagcccgtgtcggaagcctgagttctattccagctcttctgcgtggccttggccaggtcactttagccctgggcctcagtttctcctgggaagggccagattagatccgtggcctctgaggcctttaacagtctatgattcccaggccccaccatggcttgaccaacttaaagtttctctcttcagagactgggaggcggagcatcgcaggaggcagaacctgggcccaggaggctgccccgtcttgtgccgcagggctactcctcggtccctgccgctgccccctctcccggtccggggtgccttcccgctatgccaggcacctctcagcccatccactttgccttagctccagccaggcagtgggtttcgagtttccccacctgcacctccccgtctctgcctggagtccggggatcgggaaggactgtggtctggcctggcgtcctccgtgctctgaggcatctgcatcccaggctcctctcccagcccgcatcccctttctccctggcccttccccctctctgtctcctctgacttccaaatgctgagaagaaacacaccaaaggttttccttttgtttctgcagcttgactctgttgtgcacagtagtcgctttacagtgtgcattcagttctgtttccaccatgacaaggagatgaaacagaaagcgggagttcactccctcacagagcaggggctggggacccagcggggtgggtcgccttcttgtcatagcttggaaataggcccagggcagtccccatcgagagcagggccactctgaactgggactgagctgggaacctgcaggacgtcccctcagaagtgcaagtctcgggggcggggtagggcgggggttggggtttaaagacagctataaatagaaaggctgtgaggttcctttagtaaaaggcagaaaattaccacataatgctcttctaacttgggacctaattgctttgatttttggccttttgcgtgatgtttactttatgtaatcatcgcatatttagaagttaacgtttggtccattttgccagataagtccttgacacagtggctattacatcaggacttgggacaccatctggtggccactcacgtgcattacagagaagagatcctcacccgctctccaaccacctctacataataccatagctaccatagcggagacaaacagatattccccatctccctgaccataaaacacatagatacgcaaaatcttctcttgaccttatttctcttttcttttactgtttaatgcttttaacattaacccacaccccgctgaccccatttcttcaccgccacttctgcctctgttgaccaaggacatccaggcggtcatactccaggaagcagtagactctgacgtcgctctccctccacatcagctttcttccaacacgcccagccattggcttccaacccctctgccctcctgaccctgctctcctgaagcttggcaacattttccccgtccccatacccaacggcccaacctcatcctcacgctgcttgaacttttgttttggagtgcttggtactgttgacaaccttctccttgaagctccttcgtctcctcttgtctctaggatgaggagcagtctctaacatctatattcgtgtgccttagtctcattttaggattgtgctacagttagaatcagaagctgcttcgtatgagctacgtggactccacgcgactgttgctctatgtgtcccgttgctttaatgggggatatttaggaggatacctgtgcctcttggcacactctgacccagagagagtgattttcagagttgtttggctggtgctgaatacccaaggtaccaacagttcccaagcagaacctatgatcatcagataaactcccgccctcacccccaaaacaccatcaacccccttccttggcctctcttggtaatggacctccctgcttagcatggggtgtggggttttggggtaattaactggtgggctggggcctgagctgggaacacattagaaaagactgtgcaatgtggaggaggctttgataatataagcttttgtacagactgactcctttgagcctggcttagagattgtactgccgagtccccatttgctggtatgtgctgtgaggttggaaatatctcccagcaccctccatgggcttggttttcacaatgttacctggtgatgccagggaggccatgaatgctaagtggggtgtgcaatgtcagtttcgagaccacccttaactccaccctccactccccaaacagggaggctgcactggggagcctcagatccacagacacctctctccctttgatcttagatcacaccctttcttggtcaccttagcagatggaaacaactttctgagtttagcttcttagatcaagattggtgcaagggctaaacaaaaatcttgcctgggttgttcctacgtcaggctctagcaagtaagaaattgagagaagtcaccccatacaggcgaagaacggggtgagtgggcagaacacactcatagtgaagttcaaactcctggcccaggtgtccaaggcccttcgccattaagccttgttcacccatcaaagcttccactctttttcaaagttgcaaatagatggggatcctgcacagaacagcagactgtgaagatccaggacacaggaaaatcactacatctgccatcaagcaagcactggtattaatgacacacggatagacaggtccatgctgagggtgatgtgggtacttgagcctgggggaggcagggagcaaccacatctgactcagtttcctcctacaaggggaacaccaagattccacggaatcaacagggtggaagcagagcccggccccaacggcattgcaatctccaaatgagactagatcaggtttggttctccagcaactatgattaatatcaactcatggtggacagtttgacctacctcataccctgaagcaaacaccaggcacaccactccccacagcagggtttctcttacacttccctcctcactgggggtcccatgtatagcgccttcctgctccccatccccagggtcctggactccagagaggctggaggaattggggactcatggctgtgggcctcagcagggcctgggcaggaaggtgaagcacggatttcaggtgaataaacaaaggagaagacataacaagggaggctcggaatctctggccaccgggagtccaggagcagagagggggaaggtgagaaggaatgtggctagaaagccaagaggaaaatactggggggaaggaacccactgggcaggccttcatgcaggcagaggagatgtgagttcttggaatgaaaggccagtgccaccacaagacatatgctgctctgaacaggtgcagtgaccccacggaaacgcctgtgggatgaggtctccagctttgcagagccaccgggcttgtgggggcgaactgagatgagacctttcataacaccctttcaccaccctggtgagagtcaccctaacaggaccaatccaggccttatgggctactcttacaagtaagtcatatgtggcagagacttctaggcatctactcaatatccattcctcgtttttttatgagtgggacactgggcattgtacccagttgatgagtcaatttctcaacctcccttgcagaatgtgttaggtgcaacccccctcacctccttctttctgttaactggaatgtggacatgatggccagcactccagcagccatcctagaccaagaagcaaccttgaagatggtgacttttgccaaggatggtggagtggaaagatgagggaaggctggtccaggatgttcatggggccaccatgccaatgctggcctgccttcatacagattgtgtgtgtgtatgtgtgtgtgtgtggtgtgtgtgtctgtgtgtctgtgtgtaaaagaaaaatagcccctgagagtttaaggcatagttgtttggggctttctgctataggcagccagctcagtcctaactgatcacaccgtgtggtttctggaacacctgcctctactcttttccctaaacctcccccacctactagtcaatgatgtttgacatccttcaagaggtctaacctttcattccataaccagagacaaaaagtataaaatccaaatgtctgtgatcagtaatgtccccagagaaatgtaacaccactgaagaacattctgaattcacctgccacccgctgataagcaaaactgacctaacccaggtttgttccccatttgataggaagtcaaagggtatgaagccatattaagcaacccaaagggaaaggggcaggagaaattccccaagggggagagcgtttataaaaagacagcctgggcaacccagggtcatgcagccatctgtcagtgcctcttggtagaaacacagctttatgcaaatgtgaaaaggatgggatatgacttttggtatcaaagagatatgggttcaagtggtagagctcttgtcagctatgtgacctggggcaagttacataaatgtcgagccttcagtttcagcatctgaaaaatgggaataatagtaactacccagggaggtgttctgagggttagatgggaccaacctatgacggtgcttcatatgccataagcaaccctggcatcattgctgtcctcctcgtcatcatcatcaacgataattataatcctgcttttgaccaggaggctcagagagtctaaggaacttgtccaaggtcattaactaataagtgacgaagtgtaggtctctgtcatacaagggttcgtgttccctctttcatacttcactttgtagcttaaacaagaaatactgaacttggtcttctcaaaatcatttcccattttataatgagaagaatatgacttttccttcttcccctacaggcaaggtgcaatccttgaggtctgtgtgctttgaaaattgcagagcggtttgcatgtaagatgccccatgtcatcccccaggtttacaggtaaattctttgcaggaaagtattgtggtcggcacagctatgcaggcatagagtaaatattcaataaacatgtgggctgagcccaagagggctgtggtgggcaggacccagtggcactgacgtgaggtttcctgctacctccagaattgaggcactgggcgatcatacgggggtggagtcaggaagcagggggaggcccccagccttgataacaggcccacttcctctgccacccagccacatcaaagcaggataaactgtttcattcatttccatggcaactgggtccctaagacttcacggggggagggcccacctccccacgtcccttctcatttctccctgtgactttaccaggacctaccttctaagctaacaccactgcaacccttactgcccccagcactgtgaaatcaattaggccaacattaatcctcactaactgcattgacagggaggcattgctatacacccattttacagatgaggaaacggaagctcacaagctaaacgtcttgctgaaggcccacagttagtaagtagcagacccagtatttgcaagtacaatggtctggtcccaaggactagaagccactaagttattcagcctctccttcaagcattcaagttccctggcctccatcctagctctttctccacttaactgggggtgggagggactcaggaattgggcagcaggcctgttgaaaatcataggaaaggctgggcgcggtggctcatgcttgtaatcccagcactttgggaggc[134 bp omitted]gaggcagaagaatcgcttgaacccaggaggcagaggttgcagtgagccgaggtcgtgccactgcattccagcctgggtgacagagcgagattccatcttaaaaaaaaaaaaatcgtgcgaaagtatttttcaacaagctcatttaagggtcatgtagaaggtaattttgtttaactatctgtcattaattagggcttaggttctttaaaattgaaggttaactggtggatgtgagataagttgcaagagatttttgttcaatagaaaagataacctcaaaggttatggttttattcccctctgtgatgttaactatttggtatctaactttgagtcttactctagcttccatgaggagctcatctcagtttcttggatcctcctttaagccagctctatcatcgtgctggtttcctcattaatgagcgggcacaggctcactgtatatttacgtatgtgtgaggttttggaactgtttgaaaatgattccccgaaacgagggagagttgatggtttcctattttggttctgctttccctggaagaggagaggttcctgccatgggtacttggcttgagctgccctcttggggcatctgacttctccttggtcaccaggatatctgaagcttcacatggtcccgggaaggatgtggaggaaaaggccatcagcagtgagtgatggttccaagagtcccccctgctctgaggccaaaggaccctcattctacttccggctccagctgctgccctgcctggcccttgtgctgcaggcttcacatgttatcattccagggccagggcctcaccaccgccagcacctccgtggcacatctgctttctgtgctgcccagaacggagtttctacccagccgcctgcaaaaatatctcaaggcatagcgtgcattgagctgaggagggacagccggttctacttgaaactgggaagtggtctccccacaggtaatcccctcccccaaccccacaactctcttatccttttcaaaataaaaaagaatcatttcggtctttggtggaaacccaacgccctgccaagacatttgcattttaaattctttctctgagcgtactcgaaaggaagaaaggcattgcctcctagcaaaggaacttcagtcaccaaccagaagctcagaaggcattctgatctgtttgttttgggggacagtgggagggagtgtgggagggaatgaaggagtttgaccttaaactggcgtgttcctttagggtttgttcctttaactggtttgttcctttccttgggaagctgggttggcaaacccagcttttacctttcagagtccagcgcctcctaagggtcttcctgatgtcctaaatctccacccaagtctctaccatgaggtgaggaccttgttataggtagacttgggggttggccatccctagctgtacttgctctgctctttgtaatgacagacagctgactgatgggggggcaggtagatcagctgattgggcgaggcacagacaggtcagctgactgggtggggcgcagacagatcaggtaactggttgggtaggaaagttatgaacacttccaaagaaatttacaagccagtcttgagctttctagggtccataagttgttggggaataagatttggtacttctgttctgtgtgtgtttaatgtgtaaggtgagaattaaacgctgccagtactaaacaggacctggtgcatgtatacattagaaagagagaaaacaaaaatgggattataacatacttagtattggggggactgctttttcgctcaactagttattcaacatcttttgagctcagtaactatttctacaatatcatttttaataattgaatatcattccaccaaatgactttgccgcagtatactcaaccatgttcaatatttaggttttttggcattggttgattattagcaaggatgcgttgatgaacgtctttgttttgtagctacatctttgtacatccatagggattcatcaggataaaattgaggaatggaattgctgggtgaaagggtatgctttctgatgctttagcaaacacagccccccattcctcaccagcgctggcatttttgttctttctttttaatttttgccaatttgatagggggggaagaagagtcttgctctttagttttgcattttctttatgagtagtgagggtgaatattttggggggttctttttgatgtacttgaatcatatttattcatatttccataagtgtatttgcctatttcttaatggactaaaaaaaaaacctcttcatgggtttgatatattaattttttttttttttttttttttttttagatggagtctcgctttgtctgcaggctggagtgcaatggcacgatcttgactcactgcaacctctgcctcccaggttcaagcgattctctgcctcagcctcccgagtagctgggactacaggtgtatgccaccacgcccaaataatttttgtatttttagtagagacgggtttcaccatgttggccaggatggtctcgatctccagacctcatgatctgcccacctcggcctcccaaaatgctgggattacaggtctgagccacagcacttggcctgatatattaatttttattgcaaatatttttctcagtttgtcatttacctttcactcaaagtgggcttgccatatgaaaagctttaaattttatgctttcatatctgttagtcttttcctttataatttttgccctggggaatatgtttggcagctcttctccactccaggctaatacaacctatttttcttctgtagtttttgtggtcttgtcttctacacctaaacctttaatgtatctaaaagttatttttatgtttgcattagaactcttaattttattttttagatagaatttttttttttttttgagacagagtttcgctcttgttgcccaggctggagtgcaatggtgtgatctcggaggcacttgaacctccacctcctgggttcaagtgattctcctgcctcagcctcctgagtagctgggattacaggctcatgccaccacactcagctaattttctatttttagtagagatggggtttcaccatattggtcaggctggtctcgaactcctgacctcaggtgatctgcccgccttggcgtcccaaagtgctgggattacaggcatgagccaccacacctggcctttttagatagtcttctaactcaatattttttatggtctaccaattatcctgatatcatctatgaaatgactgattttttcatcagtaatttgaggatgccactttgtcatataatataattttgtatatttaatatatttctagatattacatcttcttccattatctatctattcttatacccatagtgtactattttaataactatagccctatagtaccttcaaaaaatggaaatatttccttcttactctcctttaaaaatacatgaatgaatatatactaagtgcataaataaatctttcaaatagatttttttattttctttatatataaatttatttatttgtaaaatatttatatattatgttttttagtttacatatattttataaattttaaaaatatcttggtattttgattgtggttacgtttactttcctaacacctggtctcgttacaatattgattcaacccagcaatacgattcttcaattattcattcttcagcaaagtttgttttctctatataggttattaaaatttcttttattttttatttttaattgctattgtaaattttttaaaattatgttttctcactggttaatgctggtttataaaaaaagctcttagctacctgttttctagttctgacaattctttgttcaggggattctctcagtctcgacagaaaaccaattgtttgagctccaactaattaaaatttctcttcttcagaagagaaagtattctttatttttgtctttttgcataggcaaatacctataagccaaaagaggaagattattggctctaaagaacatgcctctagtattttaccttgggctgttgccatattaaaagcacttctagagtaatcgtttccatatattgaggggttttgaatatcaggaatgatgatgaattttatgaaatattttagaggcatctattgagatgcttttgcgaatttattcctttgagtactgattcgctgagccgcttctcagtaaatcacacttgctaagttttctcctgcactactgtagcttccttagacctgatttgcatgtctatgacagcacctgcaatttctgaagaattcttacttttcagaccccacacatgaaaactgagtcccgggtcttgtccacatttgtcacagtggtcattgttcctagtaccagccaccttccccaacccaaactgcatcaacccacacacacaattacctacttgttcctggggcacagagaacatgcaaagccctcttgtcagcatcctgggggcttctctgtctgatctgggtagccttggagaccccttgactaaccagatcagaggcacaggccaaggtggggtctccttgccctgagtgcctgctcctacttcccctaacaatccctcctcgagttacctcccatatttactttcatcttgtgtggattcaaccatcagatgcttgatggtgctgtgaagaggagactccatgtttgtgaaccaaggcgttggcagagatgaatcaaaggatgcaaggtaaggagggtcacaaaaaacagtttcagaggagttggaagcattctgaccttctgagccctgtcccccgtgccagctgcctcagtgcttacctggggccttgagttcagcatcaatgaaggtgagcagctcctggcagatgctgcagtaaggaacaggccaggtcaggaaccggtggtaggtgctggctgccttcagaaggagatccgagtctggtgggaagtgtggtgtctaggatggaggcaggcaacaagcaaagagatctaggtgagaaaaggctcagatagtcccagacagcttctgctccctttctggaatattccacaaaagacacacatttcctggccgcagcgtgtcccaggacaaggtcaggtggaactggaagttactcacagggagtgggttacagatgggcaagatggcacccagggtgtctctactgggagggacttgctttacccaatgcttgagtgagcctctctgaaaggctgtccccttactggtaaatggtgccattgctgacacttgttatggataatggtcttcaatgcctaaaccacctttacttaaatagcctcattacaggtaaatgtttattttttgaggatggattcagtcagtgtacacatttgatgcccccctgtctggtgaatacagggggtgatcacattgggtgaaaccgactactggggtgaaaaatgaggtggacatagaatatctcttgtggcctgtgaacagacagtgacagcagttccaacatgggagcccagagatgccaggcaccatggcggccacatggagtcaccagaagcctctcatggtggctgctctgaagccatctaagggttgaaacccatttcacatgccgctgcttgacagtttctctctctgcttatctccagaggtgtgagggctctgccccagatagaggtcgctcctccccctcctccctcacctccagcatcctggcccacgtggacttacacaaagaacagtggaatagaagagcagggccagcggggtgagcaggtcgtaggtgcccttctcctggacctgtggagaggaggagaaggggaatgagcctcattcacggggtccagggctccctgaggcagaatacagtggttcttcctcattctagcctttcttttttttttttttttaggggaaaatagtgcaatcacatgacaaacatttggaaaatggatgtaaacgaaaacacttacaatttcccctcccaaacccaaccacagctgtttcaatgtccctcttctgatgccatttttgccctatgtattttcttttctttgtttttaaattttattttaagttctgggatacatgtgcagaacgggcaggtttgttacataggtatacatgtgccatggtggtttgctgcacccatcaacctgtcatctaggttttaagccccacatgcattaggtatttgtcctaatgctctccctccccttgtcccccatccccgacaggccccggtgtgtgatgtcccctccctgtgtccatgtgttctcattgttcaaatcccacttatgagtgagaacatgcggtgtttggttttctgttcctgtgtctgcgaagctataagctgtgtgtatatttttactcctaacgtattttacatatagtattataagtaaatttctgttttactatacggtctctaagaccaccttttttcccttctggttatacatttacctgttatttgtgttataaatatttttttccagttggttgtttgccttttaattttataaatatttttgatgtacagaaattacaggtgttgatttttccttcatggatttttgcttttgcatgcaaggatcatgtaaatattcatatatactttcttatcttctttgaagcttcgttttctgaaattgaaatatttagtctgggcccagtggctcatgcttgtaatctcaacactttgggaggccgaggcaggtggatcacttgaggccaggagttcgagaccagcctgaccaacatggcaaaaccccatctgtactaaaaatacaaaaattagctgggcacagtggcgcacacctgtaatcccaactactcgggaggctgagactctgtctccaaaaaaaaaggagaaatatttagtgcaactagaatttcacctgctatatggtgtcagttggggatctcactctatctttttccaaatgtttagtcaattttccctaagccatttaataaatcttatgatgtaattgtatcatatattaaattttatttatgcccttggataatatccatcatttttagctgcattatactccttctggtagacctccataacttattagtttctttttcttttttgagatggagtctcgctctgtcgccaggctggagtgcagtggtgcaatatcggctcactgcaacctccgcctcctgggttcaaccaattcttgtgcctcagcctcccaagtaggtgggattacaagcacgtgccaccatacccagctaatttttgtattttttttttttttagtagagatggggtctcaccatgt[134 bp omitted]ggtattttacatattttgcaatgaacactactatgcagcacattcctttttccataatttggattattaatctagaaaggagttcaagaagtggagtcaacagatcaaagattatcaacatgtttatagacttttatgacctttgagacatattgtcatattgctttccaaaaggattttgccatttatactatctatatatataaaagtacgattttcaccatgcttttcctgcattggtttttatctttttttaacaaaaaaaaaaaaaaagagagagagagagagaaatagggtcttgctctgtcgcacaggctggagtgcagtggcacgatcttggctcactgcagccttgacctcctgggctcaagcaatcctgcctcagcctcccaagtagctgagattacaggtgtgcaccaccacaactggctagtttttgtatttttttgtagagacgaggtcttgctatgttgcccaggctggtcttgaactcctgggctcaaggatttctcccacctgagtctctcaaagtgcttagattacaggcacaagccactgtacctggccttaccttttgttttttagctaatttgttaggcaaagtttgtctcattatggttttaatttgcatttattttagtatcgctttttcatatttgtttacaacttctatttctccttttgtgaactgcctctctgatacaacctaccacaccacatgcacacatgtgcacaccacatgatttagaattcattggtcagaaggtttctcggtccattttggaactcatgggggttggagatacagagaaagccccatcatgtcttctctgctagatgagcccagtaggctcaaatttagaatcttccttctctttatccttaatagacaatgtgtctaccaagccttgcagatcagacctttctatgaaaccctcctcttttgctacacggtgatccagactttccatttgggtttatatgttatgcgctccagaggtggttcagctcttctgagctggttggcttatgatgaaggaaaaaactaccaggtaaatagtggggccagaactgtaaccttgggcatcttcttacagggataggtagccgagagtgaaagtgacatgttttccaaatcacatgtatttaaaataattaaaacacacacacacacacacacacacacacacacacacacacacaaccataaaagagaattctttacaaaagagcccaaatcctcttttgggactcacagctattctggaacccaagcccagctcagcactaaacccattcctcttctttgtcatgaagccattgactgaactaagagaggaggcctcagtttacctttccgatcagttttctctttcctgtctttgtttttatggatctttttgaggaaaggaattgggtaaagtgtcttctcccttcctagtctatatctggacttataagccatgtctgtagctgaactcaggaccctagctcgcgtatgatgtgttcttactgaatgcacccccttcttagaaacctctcatatgcaagtgctaccgaaacacaaaactcacaggttcccagggcctttgcccagcccctctggaggtccaggcacccaggaatgatgttctctgggacctatttctccactctacgaggccgaccccagatctgcccttcaattcctgactccccctcacctctcgggtcttctgcaggatctgctcaaggaggataaggaagtggcccgggtccctgctgaccagctcctgcaggctccagcagttcagacacagcccagctggaaaaggagagagaggcaaggggtcagttctggtgtcttccagtcacactcaggcaggggctgtaaagaaggggcatttatgctggaacatttttctgtggtattgcactggaacactcttttttttttttgagacagagtcttgctctgtcgccaggctggagtgcagtggtgcgatctcagctcactgcaacctctgcctcccgggttcaagcgattcccctgcctcagcctcccaagtagctgggattacaggcacgtgccaccgcacccagctaatttttgtattttagtagagatggggtttcaccatgttggccaagatggtctcgatctcctgacctcgtgatccgcccgcctcggactcccaaagtgctgggattataggcgtgagccactgcacccggcctggaacactcctttctaaagtaagtgaatctaggagaagatgctggatcaacactcaaccctaccatgccccatcaagacataatgacaaattccctgttcctgcatatgcaagagacacagggattggagatgcaggctgggaagccctttagaggacaatgagctcactatgactccgctccctgtggaagcaccagttctcccacaacctctcctgccctggtttcctacagtgggttctggtacctatgagttgcagggaggttagaacagaggcagaaattgctggaagaatacagagaggagccacggtgagttccatcccaagacgcaagactgagtctacagcagccatggagcttcccaggaatggcaatggagcccaggaaggggaagctaaacgagttctattttaaaagctgccatgagcactttgtcactctgtaacttccccagactttcttattttgtcagtctctgtttccctgcagtcagcaagggtaaacccctaaaaattaaagcgacagcctggggcagaggagcagggaggggctgtgtgtatgtgtgtgtggagtggggagtgagagccgcaggagtggaaatggattgaacttgaacttcgtggagctcaagctccaggacctctcacgtgtacaggctccttccaaagttctagaggcttctaacaatgtgtccatgtggtcacaggttgtcagaaaatttgcaaaggtcagatatttttatattcttttgcttaacgatagccctctccccagccctatgagcttagcctccatcaaaacctgggtagcaggcaagaaagaaaactaccatttattgaccacctactatgtgccaatacagtgctaggcctctgaatacattatcttcattgaggatcccactgtcccttcagaaaagtggttccattgttattattcccattttgcagacaaggcaagtagagccagggtcctgggaggataagtggcctgcgcagggttgtaaagccaatgggagatagctttaatccaggtctgtctcattccaaaggccaaggacagcctctcagaggaagcgacatttgagctgagacctggatgagaaggagccagctatgtgtacttcccagggaagagttccaggcagcaggtgcaaaggtgctgaggtacggagggaccaggtatgttcaaggagcactgggtggctactcacggagaagttagggaggccagtgagatatggggcatgagaaagctctacaagcataagaattattacagccaggcgccagccttcagagacgcaactgcccgggactgcggacaccctgttttttagtcctgggaggtgggaaacatagaggcctcctgctctctgcagctctgctgagttttcccttattctatagggaagaggaggataggactatgagggaactagaaacaaacaaacaggagaattctggggagagctgcctgtgaattcccagctgctttttcagaatcagcagttgtggttttctaagcagattcgatggattcttccagaagtaaaaggcagccagccctgagtaggatgaggaagatgccgtgggagaagggagaaagtgccagacactgaggtctgactacatcaagtgctgcgccaggcacctgcccaggagaaggctgaggcttgcccaagtcacacagacagggtttcacctagaatttgccagtttccatgcctggtccagtgcccaccgtggcccctgaggcttccttgagccctcaaacacctccccggctcccttggaccgacctgaccaggaggtggagcggcggctgaggctgagtccatgcaggcagcgttccagggcatgctggatgcggtcctccgtgcatgtcgtggcccctggctgcatcctgggtcatcgcctgcatgggggacagacgccggtcagcttgtcgagctcctttcccagagagcacctggtccagtaaagacaacaggtgctcacagtgcagcgcgatcagcccagcccagctatagctcaggtgctgtggaaacaggaccaggggccttacagctgcctccagggtaggaatggcatctggagggccacatctgagtggcaggacagagcacccctgcagcagaacgggacagaggtgtgggaagtaaggggtcaggaatgggagcagagaggtggaaagggcactgggcagtgggaagtgtcgccaagtacccagggagtggtcagaccccagtgggctgggcaggaagatcctgaggggaaaatcagaatcactcggaggactttttctgaatttccaggctgtgttttccaaacctccagggatggggcagagagcgtgttcctgatgacaaggccacagcaactccctcaatatgcttggagggagctccctctgattgggtgcccaggtcacaggcatctgtttcctttctgccctaacctccacttttgccatttttctttccttcccctggggcttggcaatgttacctgtcattcaaagaccttccctgccctccttcctcatcctactgaggagaatccaaggggtgcttagctgagctggaaagtcactgaagagggaatttcaggagggttttagccccgtatggggaactgagagcccccagcagggccagcccagcttcttagttatgtatgagggctcctgggtctctggggaagccacggaaggtgatttggcccagtgattaagcttggctctggcatccgacggacttacactcaaacctggactctgatatttgctagccatgtgactttgggcaaatactttaacttttccaaacttctgttgacttatctgtaaaatgggatgacaatggtgctaacctcatggggctcttgggaagataaaatgctgtagcagatgcgctgagtaagcttccaacacgcgagagctgccctgctacagtcattgccatcatcgccctggcctcaggggatgccactgcactcactccttccgggcagaccccttcactggccagtcaggccaggccatagagggatgctgagaaagctgcagttcagctctggaagccagaagaggaagcacagagctcagagctgagccatgcagatgacatacaaagagggataaaatcctaacctgggttcagctgcgcggctagagtattcagcttacggaggccccacacaggcaaatcctcctgcctccccagcctgggaggcaccactcgccaagtgaaaactaagccctttgtgagctctccagcatcctttcacagtgtctgtggtaggctatgcattccaaagccggacagtgcagcagtgggcacgcaggaagcggcacacgcaccttggttccatcacgggttcactgactgtctgccatgtgccaggcactagaggagactagaggagacagcagtgaaccaagcagctgtgctccttggtgggagacacagacactgagcaatggagcaaacaaagacgtgattccaagaagtgaaacatgctgtaaaggatggtgctgggagtgggacaagtggggacccccctccagggtgttggggggtcagggaggcctctctgaagaagggacatttaagctggatgaggaagccagggcaaatgagggggaagagtattggagaaaggggagccagcccatgccacagtctgggtgcaggaattagcttgctgagaacctggacccaggagtatatgccagggcgccgggctggcccaggacaaagactaacccattaggtcccatgccttctggctgtggaggtgaagagctgagttcagaaaacttttcacgggtggctgggtgcggtggctcatgcccgtaatcccagcactttgggaggccaaggtgggcggatcacttgaggtcaggatttcgaatccagcctggccaacatcttgaaaccccatctctactaaaaaatattttaaaacattagccaggcgtggtggcaggcacctgtaatcccagttacccgggaggctgaggcaggagactcgcttgaacccgggaggcggaggttgcagtaagtcgagatcacaccgctgcaccccagcctgggtgacagagcgagattccatctcaaaaagaaaacaaaaagaagaaaacctttcattggtgactcaagaccttgggtgtgtccattagcagcacctggatgcccaaagacatcctgaggcccttccatgtgacttttacagttgcctttggatcttctgtttaacacctccacaggtagctcaggtcgtgagtccactgaccctgagccagaccgggcagacccctccctgacctgggattgtgctggcacctggcatggatgagcatctgtggggactgacacctgtgatgaggcctcatctttctgcctcccatggcagcccgaccacaagaccctctggaggtgggtcctattccagctcagggctaacggcacctgctggaggaggtagaacaccagacaccttcacatggatgagcctggggcatgaacagctggcccagatgtgacagcgaccctttgttctcacaggctgatttctcccaggttacccccagagcaggttcttggagggagctcagaggcctccccagcaagtccctcattttacagaaggggaggctgaggtccaggaaggataagggacttgttcgaggcagctgggagagagttgacactggtataaacagacaaggggatcagggaggactttttattttcaaattgtggctgagacccaattctagggacaaaagttgctaaatcctctgcattctaaagttctaagagccacggagtattgtcaaggacgtgggcgcagccactctggtgggcttgctgggaggtgtcagtccagaaccagcacagtgacccgccaatccctgtcataagattgggaagagaaaaagggttgtcagcccatctggaagatccttccttctctccgcaaagctgagggcagagggctttcagagaagtcctgacacagactgggatgcccaaagctgaggatgctgccctttgttcctcgggtcactatctactcagccggcaaactcgctcgcctgctccggtgctgcctgtgagccatggcagggctgagacaaggggcagagggggcatcttgcagacccactgttggacaagtcagcagctccagattggggtgaggggtggaacaaacgtggggcctgagccggtttgttgttacttttctagagggctgccagcagcatgagggaaacctatcagaaggaggctgaaggctggaccaattttgtaggaagctggatggggcaggttaaagatgggaaattggtggcacagagaggttaaacagcttgcctaaagtcacacagctaggagatggcaaagccagggtataaacccagggggtctggggtttcaaccactagaatacattgcccctcagcacagtcggaggcagttactggaagaaaattaaaaccaattcatgtttctacttcaacaagtgaagacttgattttgctttaagaggtaggctaggcatgtctgtaatcccagcaatttgggaggctgaggcgggtggatcacctgaggtcaggagtttgagaccagcctggccaacatggggaaaccctgtctctactaaaaatacaaaaaattagctgggtgtggtggtgcacacctgtaatcacagctactcgggaggctgaggcatgagaatggcttgaacccgggaggtggaggttgcggtgagccaagatcatgccagcctgggtgacagagcaagactctgtctcaaaaaaaaaaaaaaaagaaaatctagactctcagttgctggggattgtgagccccaccacatctatctacaccagctgccccgcacagccctgcatcctccagagaaaaggccaaggctcacaggagtgtgtgccagaggggataccgagcaacactctctcggactccaccggtgatgaccgtggtggctcacggggcccaggcgtctctagcctggagcatgtcctgaaccgtgtgatctgggttttaagacccctctgcccagcccctgctgcgatggccaagctggttatgccatgaagcaggagtgagtcatcctgctcactcattacgtgtcccacactgtaatggatgcaaacacaagatgcaaatgaatgttctcagccaacaccacttctgcacactcctgtccttaagggggcagaacacagtgccataggactgctgctagcacaccgcacccaatgcctgactgcccatggcttctctttctcattctggggccgcctgtgactttcccatctcctggcctcggtgtgccccttccccccaaccccaccctgctcaagggacacatcaaagccttctccacggaagggcaggatatcctcaggcactggtggaattctggtgtgccagcctccccggcattccaaggctttctcgagctcgccccaagttcttctcagaggcaggacttgcctgagccactagcccctgggagcctgagagatggggagagggaacccagccaggggaccctcagctgagctgccctgggggttaacccagcacaccgggctcaccacccacccctttgacacgctcatttccgtctgagtcagtcatcagctgtttcttatgacttgtcagcagaacctcacggctttggggcagaggtgaggggggaagacagtggcacccgctctcccagcatgacgccttttttcaaaagctgggcaagcagggcctggcttccctggcatcaccctcccaagccccctccctatcttgttgagaggagctcccattgtaaaattccagctgctgccgggaatgccgccccccgcccccccgcccccgccaccaattcccctgccagtggtgaggtggtgttgaaatatccaacaacagggccttcccccatctccaagttcctcttctgagccagcaaagaggactcatagtccttgctggggaccctgcatggggcagaaaggcctggagtcggggtgggttggtgggaccccagagggcacagagagagccagtcctgcttccactttttcttcccatgttgacaggatgccatgatgtggagggctcatcttccctctggtgcagggctggtcagaggaggtgtagggtctgcctgggtccagcttcccaaggcagcccacgatggggcagggaggagagcctcttgggggtttctaaatagtaatgaaaggaggagttagagggcctgcatctcatatggagggggcctccaggttctggctggctctccacactgctttcctggtgttctggaatattctaggcccatgcagtcctgggctgacccagcctgcttccgtcctggatgactcctccctctcctgcttcttaccttccgaggcttgactctcccttctctgccccagtcccttcctcatgccttcataaggcagaatctccaccgtgacctaagtaaaagaattcttcccaacacaggaaggatacaccagaaattaaggagattggttagttactatgggaggtggaggtgagaaaagggtggataggatcaaggaatgaaactggagatgagggaggaacagcacttctctgaggattatctgtgtgtatagctttaacgcttagaaccatggcgatattttacatacccaaaattaaataaataatcgaaatcaaccagaatatgggggcaggggaccaaaagtgggagacaagcaataacaaattaacctaactgtataatcaattactaacataaccacactgacggggatagggaatgaaagcactaacttcagtaactttgtaaaatggtactttgactggatactggtcaaagtcaaaaataaaaactatagacaaatactgttttccagttattaaatatgtttctcatatgaatgtgagttaaaaattctaaaagttcggggccgggcatggtgactcatgcctgtaatcccagcactttgggaggccaacgcgggtggatcacctgagttcaggagttcaagaccggcctgaccaatatggtgaaaccctgtctctattaaaaatacaaaaattagccaggtgtggtggtgtgcgcctgtagtcccagctactcgggtggctgagacagaagaattgcttgtacccaggaggcggaggttgcagtgagctgagattgtgccactgcactccagcctaggtgacacagcaagactccatgtcaaaaaaagaaaaaaaaagaaagaaatctgaaagttctttatgtgtacactagcattagacaaataagtgaataaaccatagataataagagctaaagaaagatgtgacaaataaagaagggggaaggctggaatgaaccttgtggagttggaccagacttgaaagaatcagtatgaactcatggtttttaatgtatatacagataaatacatatagaaaaattttaaaaagatgtatgtgcttggattaatacacatacatacattttctagttctgtctacagagaaagcccagaggcaatgacatcccagtagcaacaagcacacctagtgcccagatcttggtttctaaataccattttccaataaaaggaaacagagctccttggagacatggctgatcctaggattgaaacaggaaatatacaaaataaacccagcacatcttgtagtgccagaaaataagtcaatatttgaaaaaccatggggagtgtcaaaaggacatagggtctaacctgaaggagcttccaatggccacagctaggacaatttgaatgaacaaagaaagtgatgaattataactcatagaataaaataaatacccacaagtctatagataattatagataattaaatgttatagataattgaataaaaacataaatggaggagaaatgacaggtcttctttacaaaagaattccaattaataatgtgagaggaatgagagaaatagaaaattgtcactaggcaaacaccatggtaataattgtagatccactgatgaatgctaaaaatctgttagtgaaaatctgtggacaaataggatatttgtatagcctcaaagtatttccccccaaataattaccacttataaaggggaaaacaagaacttctcagtggaggaacccagcagacagcacattaaccatatgatcaaggttaacatgaccagcaataagctatacatatcagcatcatgtatcccctgctgtaatgcactgagaagggaaggacacgtcacttctttgtgtttttttgtttttgtttttttgccaaaaacacataactacaatcatgagaaaacaccattcaaaacccagtttggagacattctatatggtgattactcaccacatagacattcactatggtgagtcctcaccaaagtgttcaggtcatcaaagataaggaaagatagaggactatcacagattggtagagactaaggagacacaaaggctaaatgcaatgtgagatcctgtactgaattgtagaacagaaagagaacattagggggaaaatatgctaagattcaaatgaggtctgtcgtttagttaatagtactctgttagtgaccatttcctggttttgataactgcaccatgtttatgtaagttgttaattagaggaagctgagtgaatggtagacatggctctaagaccttttatatatttacatagccttatgccctttcagtatctttccaggcagttatcaaatgattccctaccttacatgagcttcttgaacattgctatttcttctgtagtcacagtggactagcgcaaggctggctgcctcaaaatcccccaacctgaagttcctaaactggggctgagaatttctggggctctgtgggggatttaagggctgtctttgagaatgttcaagttatgttttcattttaatgtcagtctagatacagttcatagttaatatattctggaacatcttgatgaccacctcatgaccaaatgttaccagatctccgtgcccagtttgcatttgtgtcataccgtgttggtgtcacctaaaaggacagggcacaccatgtgtgtgcttgggatctgcaagagctcaaggttaagcacaatgagttaacatagacaaatgtgtggaaacattcccagtgcataacaaacattcaatatatgttctctgttacctatcagagtttccttcctctcctctccttctctctctctctctttctttctttctctttttttctttttccttcttttttttttttttttttttggacggagtctcgctcttttgcccaggctggagtgcagtggcgtgatctcggctcactgcaacctcagcctccgaggttcaagggattctcttgcctcccgagtagctgagattacaggcatgcaccaccataccaggctaattattctacttttagtagagacagggtttc[143 bp omitted]cttgatgtcttcagaactaggccaagaaataaaacacctcctgcatgattctgacgcacagttagacttggaaagtcatgctttttattttacacacacatgcatacacacacacatttgactctaagactgggaaggcaccttaggtaccatttagtacaacattcccactctacagatatgaaaacaaaggctctgagtggtgaagggacttgcccagatcagacggcagtaaatctgtaagtagaatctgagcctggaacgaaggataatcatgcatccctctgcatagatgaggatcgcactctccttgctgcccagcagtgagtgacttcagctgctctcctcaaggctatttttggaatcccttttcaaatttcttccagagttattggtctgttcaggtattgaactttatgtgtcaactttgcaaatttaggttttctgacaatatcattcactttaatcaagattttaaagttaattagcaagaatcagaaattcctatataatttttacaattacttctgtaattttagcccttcttttaacgtaacttgttttcttttaaaatacaggtccatatgtatattaagtatttttttttcttttttctttttcttttttttttttttgagatggagtttcgctctagttgcccaggctggagtgcaatggcgcaatcttggctcactgcaacctctgcctcccaggttcaagctatcctcctgcctcagcctcctgagtagctgggattacaggcatgcatcaccacggctggctaatttttgtacttttagtagagacgggtttcaccatgttggtcaggttggtctcaaactcctgacctcaggtgatccacccgcctcagcctcccaaagtgctgggattacaggcatgagccactgcacccggcctgtattaaatattttatactacttcatagttctttcaatgtttttgacatttacattaaatgtaataactgtgataacagcagtatttttggacagtggctttaagtttcatttattttattactcactgttttgttttgtaccctaccattcctacttataagtcctttattttggttcatgtcttgctcactcaagtatttcgagtagtttcaggacagatatgtgggtgaggtactttctgagactttacatgtcatatgtcattcattctggctcatgaattatagctttgccaattatagaattggcataattcataatttttcaccctcgaaatgttcatagaaacccaagaaaatcaactgaaaaatggtcataccaaagaacagagttaggtaaagtggttaggcacaaattaatatagaaatcaatattatctaactatgcaaataaattatgttggggaaacaagattccacttctaacagcaacaaaagtaatacaaatttttttaaaaactttaaaaatatgcaatatttttataaagaaaatgtttgagggacacgaaaaagcaaaagtaaatggaaatacatattctggtgttaggaagattcaataccataaaaaattaattcaaaaaggatcaaagatctaaatgtaaagtgctaaaactataaaactcttagaagaaaaattgggggaagcttcatcacattggatttgtcaaagatttcttggatataacacaaaaagcacaggcaacaaaagaaaaaatagttaaatatcaaaatttaaaactctgtgcattaaaggatacaatcaacagagtgaaaaggcaagccatgttatggaagaaaatatttgcaaatcgtatatctgattaagggctaccatcttgaatatataaagaactcctgtataactcaacaacaaaaacaaaccacccgatttgttcattctccatgagtttcagcctggagaataggaaagaaggagggaaggagggaaggtgggagggtgggagagaaggagggagggagggaggaagaaaaggaggaaggtaattattgagtggctgatctgtgtcaggtactatgttgggcgctttcacttagtttgataatcataattgattatcaaattgattatcaaattatcaatccccattgtcttgggaattaacattcagttaatccccaagacattgattacttagtttgataatcataatcaccctgtgacattatcataattattcacatttcctgcagctcagggagggtaagccatttattcactcaagttcctatggtcacaattcctatggcccgagcttgaagtctgtgcaaagttggcgtgactctcaaagcccatgttctttcctatgtcgtgttcataggaagtcatttctactggtttctagacacttaaagggctgagtgtactgtttcgtctcagtgttgtaatttgaggcttccagggaagacgtcttgcataaaaattggctgagtttccattgttggtgattcattctccttgggttagggctgttcacttcctctgtcctagcttatttttcaagatgtaagattcttggaggatgatttagccaccagatgagtctgttacagcagtgacggtagctagtgggcaggagaaggactctggggccaggagagggaggaaatgtgaaaaggtaggtggacatggtgtggaggtccagggaaggcagaagatgaagtagagatgtaccaaaagaaagaaacactgaagaagcagaggcaagactgcccacttccccccatctttgctcaagcccttctttaccaaggaaggggcacaggaatgcctgggaagaccacagttgtggtcaagaccaagaagaaatgggatgaggatgaaggaggggaaggagaaagatgctaacgtgtacacagcactgaccctgggccagataccatgcttagggcttgaagcacatgatctcatttattttgagccactctaggacactctgaacttgcagagatgaggaagttcagctcctgttggctaaaagactttcccaaggacatacggatagcacagagaggattcgaactaaggtctctctggtccactctacccaggtacagtaccgaaaagacaacaggatgtacaatgtcaccttttcatataataattttaataatagcagctaataggaattgaaagcttactatgtggcaggcaccgttctaggtgtttctatgaattaagtcattaaatccatgtgaggtagacactccttacccccattttacagatgaggagactgcggtacagagtattctctcagctggtaaatgaagtatgctgtaggcaatttagcttccccatgcaagtaagagcagctatactggagccaggggtgggcaaactgaaattactgccaagctgggaaaccagaggaagactataacaataaaacaagcaataagctccaggcagcaaccgaattctttgggcacctgggctaaaccttgggcacttacacgggagactgtttaatcctaccacctttaaatatggagcccatcttaatggttagacaatgtgcacaggagaataaagcagcaaatgaatgtaaatgtaaaaactcaagaaaggccaattacacatatattggcagctttctggtttttctggatgtggaaaaagattgcagttgtgacattgcacccttcccttcccttcccctcccctcccctcccctcccctccccttcccttcccttttcaagacagggtcttgctctgcctcccaggccagagcgcagtggtgtgatcatacctcactgcagccttctgggtgtggaaaaagattgcagttgtgacattgcagccttcccttcccttccctcccctcccctccccccctcccctcccttccccttcccttccctttccttttcaagacagggtcttgctctgcctcccaggctggagtgcagtggtgtgatcatacctcactgcagccttgacctcctgggctcaagcgatcctcctgcctcagcctctcaagtagctggaactacaggcacatgtcacaatgcctggctaatttttttttttttttgtagaggtggggtttcaccat[137 bp omitted]ttgtaagacagatatgaatatttcatagttttgggcaaggaagatttttctccttccagagcactgtgacttctagatgctttactatcagaataagtttggggtagactggtccaatccattatcttttcccttgcacagcttttcttctcttccagagtgataaaccatttaccaccccgtcttctctccattaatccaacagcaggtcattgttctcagacacgggcacatcttcactagtctcctttttactctctttgaactcctgcccaattatgcaagaaaaatctctcaaattctccccctccatcccattcatgaatatgctttagagcgaaacctctctaacaagaaaacagatactcatcaggtttgtggacagaactgaaatcagacactcctcccgatacttggccaggtgtggtttttacaactttttatgaaacaaacgctgatgtcaagagtcccgtttagcccagtctagaactctctagatctctaatggacaacttactatgacattagggcatcaggcactgatgcagtctctcccaacttctcaccaaatataccagatagatagttagatagtagatggatagatagatagatagtagatgaatagatagatagatagtagatggatagatggatagatagatagtggatagatagaaagtagatggatagatagatagtagatggatagatagatagtagatgaatagatagctagatagtagatggatagatgggtagatagatagacagaaagtagatggatagatagatagatagtagatggatagatagatagtagatgggtagatagatagatggttagctagtagatgatagatagtagatggatagatagatagatagtagatggatagatagtagatggatagacagtagattgatagatagatggattgatagatagtagatggatagatagatagatagtagatggagagatagtagatggataggtagatagtagatggagagatagatagtagatggatagatagtagatggatgatagatagatagtagatggatagatagtagatggatagatagtagatggatagatagatagatagtagatagatagtagatggatagatagatagatagagaaaaaaggaacacacatgcatacaatccaaactgaaaccaacactgacaagccagaatgagggattgacattatgtctaaatcagatggaaatggattaagaaaatccaggcttaggttcaggccaaaatctctataataagtgggtacagcttgcatcatggctgagtacattttggtccccaagtgggtgtgcactttttccttggatgcttcatccccttttgtcttttcctttaatgcagatagatgcatcacattcactgagatggagaagtttggggagaggacaatttgggagaggaaaacaagagtcctgctttgtccgagttctatccccttcagaccccaatggagaggtctgggctacagctctctatttgggagttcacatggtgctgtggtcactgaggctgtgaaccatgtgaagcgagaagagtgaggagaacacctccagtgttaagaggtggcaccggaagtatcacaaaaagacactgagaagatgcagctcatgagcaggaggagaacacgatgtgacaggatccaaaacaagcatgtttcaaggagggagtgaggaatgccactgcaaggtctacagcatgagggcagagaagtggccactggatctggtgacatggagggtttgagtgaccatgaaagaacaagtgcaggaagaaaagaccaaatggaatgggctaaggagagagaagtgacagagaggcaactgctttgggaagctttgctcagaagagctgggtttatgaaatgccccaggatccaaaagaaccctaaggttcttccagtttgaaaaaaaatgtctatatcgatgtcaaaagaaaaactacccgtattagtccattttcatgctgctgataaagacatacctgagactgggaagaaaaataggtttaattggacttacagttccacacggctagggaggcctcagaatcatagcaggaggcaaaaggcacgtcttacatggcagcagccagagaaaaatgaggaagatgcaaaagtaaaacccctgatagaaccatcaaatcacgtgagacttattcactaccacaagaacagtatgggggaaactgcccccatgattcagattatctcccaccaggtccctcccacaacacatgggaattatgggagtacaattggagatgagatttgggtggggacacggagccaaaccatgtcactacccaacatggttacacgtccaaatgctaacagaaattatatctgggaggtaaaaataggaataatttttattttttattaaacatttttcataatatatattttatgccttgttttttatcacatagataacagaggttatatatatataaattaaaaaatggtgctgggtaagtggagtagatatgcttttccctattccatttgaaatacaactacaagccctgaacaatatatataaaactaacataagagaccctgaaagagagagagaaggcacacaggctagggaccctggggacaaggaatggcatgggtgagttccctggcttctctttttgccttatagattccagacttggagctgaacagccagcaatctgaaaaaatgggtgcagatttaaaataaagccctcacaaaagcctgctctctctagccaaagcctgaggaaagaggcaacttagcaagacagacacttttagacaatacctgctctattccagccaaactccacagggaaaattgtggtgccacctccaccagcaaaagccagttaatcggcttagacttccaccctggccaggccgtaatgaggttccccaaatcccctgccatggccactgtctgaagaagccaagtagatagccaggtcttttatctccattagcggtaattagccccctcccactccacagtgttagtggacaccagtgaggagcctggacttccacccccaccagacagtaaagagacacctccatgataagatgatgtcagaggaagcctagcagggagtcaagacttttaccactgcccagaagtaatgaggtcatcccctctgctgtggtggcattgtagctgtaaggaggcactcctaccgtttctagccagagacgtatcagtggaggcctgttagaacttagatatgtttttttttggtcccaccaagtctcatgttgaaatctgatctccagtgttggaggtggtgcctggtgagaggtctttggatggttggagccaatctctctgaatggcttggtgtcattctcatgggagtgagtgagtactcactcttcattcctgagaactggttgggaaccagcttagttcccctgagagcctggcaccttccccctgcacccagtttcccaccatgtgatttcttcacaccagctccttttaaccttccaccatgactgcatgtggcttgaggctctcaccagatgcagatgttgatgccatgcttcttgtacagcctgcggaactgtgagccaaataaacctcttttatttataaatgactcagccttgggtatcctttatagcagcacaaacaaagacaaaacctaataggtagctggaactcccactctaccccttagtaatgtcagacaaaaggtctaacattcatgtgattggagtaccagtgggagaggagaaagaaggccgggctgaaaaactacttgaagaaataatcacttaaaacttggcaatggaggctgagtgtggaacctgaagaggagaacctcctgggagaggagaaagaaggcagggctgaaaaagtacttgaataaataatcacataaaacttgtcaaatttggcaaaatatataaaactacagttttaagaggctgtgtgaaccataaacaggataaagccaagaaatacacaccaagacatctcatagtcaaaattctgaaaactaaagacaaagaaaaaatcttgaaaggatcaagagagaaacaacaccttatcttagatgaaatataatttgaatgacagtgtacttttcatcaaaaattatgaatgctagaaggaagtggaataacatattctaattgctgaaggacaagcactgtcagcctagagtccaatatccagcaaaaatatccttcaggaatgaagaggaaatcaagatactctcagagggagaaaaactgaaataatttgtcaccagcatccctactctagaagaatggccaaaggaaattctctaaacagaaaaaaggataataaaagaaagaaatcttggaacatcaggaagaaataataagaaagggaaaaatctgggtaaatacaatagattttccttctcctcttgagttttctaagttatcttagatggctgaataaaaaataacacagtctgatgtagcattaaatgtatgctgagtaaatatttaagacaatcatattataaatggaggcaggtaaagggaaataaagggaggtacagttcactaggactggtaaaatgataacagtggactgtgataagtaacaatatatgcagtgaccattcaaaaagctatacaaatagatatatataaaagcattacagataaaataaaaaatgaattctaaagaatgttcagttagtccataggaaaaaatgcaaaaccaataacaaaatagcagacttgagccctaacatatcagtaattacattatatttaaatggactaaataagccaattaaaagacagagatttgtagtgaattataaaacataacccaaccatttgctgtctacaagaaactcactttatatataaatatatagacaaattaaaagtaaaagggtgggaaaatatatatcgtgcaagcattaattaaaagaaagcagcaatggctatattaatatcagataaagtggagctcagagcaaagagaattaccagaagcagagagggacattatataatgacataaggtcaattcactaaaagacacagcaaacctaaatgtgttcacaccaaaaagatatgtgaagcaaaaactgagagaacagaaagaaaacatagacaaactcataattataagtggggactgccacagtggaatgctatacagccaaaaaaagagaacaaaatcatgtcctttgcagcagcatggatgaagctggaggccattatctcaaggaaattaaggcagaaacagaaaactgaataccacatgttctcacttttaagtgggagctaggctatgggtttgcaaagaaatacagagttgtataacggacattggagactcagaatgggggagacatggaagggggtgagggatgaaaaaccaactactgggtacaatgtacactactcagatggtggatccactaaaatcccagacttaacaactatacaattcattcatgtaaccaaaaaccacctgtaccccaaaagcgatcgaatttaaaaacagtaaaaaacaagaaataatcggagacttcagcatccttctctcaaccactgatagaacaactgtaaagaaaatcagcaaggatgcataagaattcaacaacactatcagtcaacaggatctaataaacatgttagagcactccacctaacaacagcagaatacacatttttttcaagtacttacggaacataaactaagatagatcatatcttgggccttaaaacaaccaaactttcaattacttaaaaataactgaaatcatacagagtgcattctatgaccacaatggaatcaaactagcaatcaataatagaaagatcacagaaaaatctccaaatactcaaaaactaaacaaacttctaaataattcatgggccaaagaggaagtctcaagagaaatccaaaaattcactgaaggaatgaaaatgaatgtacaatgtatcaaaattggtgggatacagttaaagtagttcagagagagaaatttatatcacaaaataacatatattaaaactgctgtatggcccagcaattgtgctcctgagcgtttatctcaaagaaaggaaaacttatgttcatacgaaaacctgtacatgaatgtttataacagctttgttcaaaatggccaaaaactgaaaacaaactaaatgtctttcaatttagaatatggttcgacagactatggtccatctatactatggaatattattcagcaattgaaaggaaataactattgatacacacaacaacctgggttaacttccggaaaattatgctgaataaaaacaaagtcaatgccaaaagaatgcgtaacatattatttcattgcacaatacttttgaagtgacaaaattatagaaatggagaacatattggtggttgctagggttagcattagggcaggtgcaggagggaagtgggtgtggctaaaaaagggcaacatgagggatcctcgtggtgatagcaatattctatatcttgactgtatcaaggtcaatatcctggttgtgatattgtcgtatttgttttgcaagatgttaccattggagcaaactgagaaaagggtacaaaggatctctctttattatttcatagaatgacatatgaatctacgatttatctcaagatgtaaaagtctaattaaaaaacaaaacttaaaagccttgtacagataagtttaaaatgttaaaatataagctttaaaactacctagaataaccactaccaatagtctgatctttatccttctaaaaactttattttttaaaatcccacagatcatactcaaatagatttatctcataaaagaggtgatattcgagagtccacccaaaagaaggggtgctttcaccatcagatgagaagggataattggcactggactaagcctccctccatgaacaattataagactacccaaaacagctgaagcaactgtttatagacactgggcaacaggcaagcacaggactgtaatccctcagggaagggaaacacacaaggggagcctcttgatttcgctgggtttctgctggaaggcacttccgttgtttgaagcatagaggtagaatgcaagcagagtacagggggctttccgagttgaggagacagaaattggagtttggaactctacaaatggctggactgtgtggggcaaggaactggaaaagagggaaacgtgaaaaagaagagctcaagaagacattagctgaatactaagctgtgcagggtaagacctcatgaagcctggcagaaacagctactggaaagcctggagttgaacagaggttctagaagttgcacagtgctgggagacattggatttccaatcagccagggtggaggaacttcactggatacctcagtcattcatctgagatcctaggaaggtaattcttgacatctagacatccattaaattttaagaaacacttgaaaggatcctgcttatccacctataaattaactgcctggcagaatacaattctttaaagaaaaacaagaaaatccagacgctcaacagtgtggcatccataatgcctagaatacactgaaaaaattactagacagatgaagatgaagaaaaatgcaattcattactagggaagtaattcaatgaataaaaaccaaagagagtaggtatgttgaaattaggaggcaaagactttaaaacatctattataaatatgttcagagatttcaaggaaaaatggacagagcaagttaacagatggagaaatctcagaagggaattggaaacctttttttttttatttttgagacagagtctcattctgctgcccaggctggagtgcagtggcgtgatctcggctcactgcaacctctgcctcccaggtttaagcaattctcctggcctcagcctcccaagaagctgagattacaggcatgcactaccatgcccagctgatttttgtatttttaatagagacagggtttca[131 bp omitted]aaatctattaccaaaaggaaacacaatctctgaaaagaaaagttcattggatggactgaataaaagactggacactgcaagaataagatcagtgaacttaaacgatagaaaccattcaaactaaaatatagaaaataaaaaaggttttcaaaatatgaacagagcctcagtgacttctgagcacaaccaaaagttctaatagatatgtaattgatgtctcaaaaagagagaagaaagaaaatgggtgcagaaaaaaatattttaagaaataatggccaaaatgttcccaaatttaataaaaaatatgaacccatagatctgggaagctctaaaaacccaagaaggatacgtgcaaagaaaaccagacctaggtatatcatagttaattgctgaaaatcaaagataaagagaaaatctcaaaaagcagccagaagaaaaagacacattgtatgtagaaaacaacgagaaaaactactgacttcttagaaacaacacaaactaggatagagtgatatacatctttatagtgcttaaagaaaaacaaaacaaaaaaaggactttcaacctaaaattctatatccagtggaaatattcttcaaaaacaaaagttaggaaacttaatggtgtgattgaaatgttttatatattgttaggtctgtggatgacatggatgtacacatttgtcaaaattgtacagttaaattttttacattttaatgtttgtaaatttttcatgaaaagaactataaaaataatcaaagggttgggaagtgaagaaagttataggtaaaacaatatttttaaataatgaagataaagacatttgaagacaaaaagatgctgaaaagatggtcaccagcagacatgtattactaaaaatgctttttaaaaagctattgtatcaaacctttaagaaagaaataatatcaatcttactcaaattccttcataaaatagaggaagaggaaacacttcccaattcattgatgaaaccagcataatcctgatgtcaaaaccagacaagaacactaccaaacaaagaatagtacagatcaatatctctcattttacatttcaagatgcaaaaattcttatcaaaacaattaaaaatgaagtctagaaatatataaatataatcatttccgaaataagtaaaaatatataaaaagaccaaatgggacttacccacttggaatgctgtacttggaaagttgttgtactgaaagtcattgtactgaaagtcaactttcaaaaattaatgtaattcaccacattaataaagaagagtgaaaaaaaatcacataactacttcatgaatgcataaaaagcctttgaaaaaactcaacccccgtttataagaaccctcagtaagagggaactgctcaaacttataaagagcatctatgaaaaatctacagttaacatcatacttaaaggtgaaaactgaacgcttttcacctactattgggagcaaagcaaggatgtctgttcttacctactcaacattgttctggaggtcatagccattgccatgaggcaaggaaaaaacacgtatatatcagggaggaagaagtaatgctgtctttactctgagatgacatgactgtatacttagaaaatcctaaggaatctattaaaaactaccattagcgaatttatcaaggttacagaatacaaagtcagtatttaaaagtcaattgtacttctacatattaataactaccaatttgaaagtgaagtttttagaaacaccattcataatagcatcaaaaagccaaaattcttagggaatttaccaaagaatgtggaaaacccccaccattaaaactacaagacattgctaagataaatcaatgaatacgtggagagatatgccacatttatgagtcagaagactcaatattgatattatgtcagttttcctccaagttcatctatggattcaatgcaatcccagtcaatatctcagcaaactttaaaaaatagaaatgaataacatgccttcggtatatggaaataccaaagacttaaaatagctaatacagtttgggaaaaggacaaagttggacgactcatcctatctgacttcaagatttgctctagggctacagtaatcaagacaatctggtactgacgatttaagcacacgtagatcaacacaataagtcgtatcatgggtttttaaacataaatagaaccatagtatacatgttgttctatgcacggttgtccctgagaaagcatatctgattacatcattctctcccagccctctgaaacctttcctttgggttttcattgccttgagtcaaaactcaagcccataacatggctcactggaccccaagagttctgtgcccttcttctctagtcagtctcaaacctctacctttcctctccataaaacttcttcctgcatgtgctgcctctgcctgaaacatttccaccatgttcccctgtttctgatgtggatcttaatatgcattcttctgtcttccatttccaggtcacttcttcaggggagatcttctgacctccaggcttggctggatgtccacccccaccctttcagctcccagagcatctctgcttccactgtgcctgcgttataactgcctatttctctagcgggctttcaactctgacgtcaatgtcccatctaacataatggttctaaccccagtgcctggcacagggtctgggcagattctccctggaaagttacatgagtgtgcaaacgaaagccccgcccaaatataggcccatgatgttatgaccatatgagcaataggggatattcctctggcttcaaggggaaatcacgtctattgcaacgtcccagtgagtcagtcttcagaggtgttgaacgagtcgtttttggccacccacagtgtgggcaggttgcctgggagacctgcttccttccttgtttcctctgccagaggccaaaggaagagattcaggtcagaacccaagcttccccggagctgttcctaagacctcagagtacaaatacaggataatttatatttctattaatttatttctttctgtacattgtgctctcccctcaccctatccccatgctaaataagaaggcaaccatcctgaggaaggtttgtggcaggaaagtgaacagctctgagctcccggacagctcctggcaggatggggcttggcatcggatttcagtcaacataagaagacaaggccacgcatggtggctcacgcttgtaatcccagcactttgggaggctgaggcgggcggatcacgaggtcaggagatcgagactatactggctaacgcagtgaaacccgatctctactaaaaatacaaaaaattagccgggcgtggtggcgggcacctgtagtcccagctactcgggaggctgaggcaggagaatggcgtgaacccgggaggcggagattgcagtgagctgagcttgcgccactgcactccagcctgggtgacagaccgagactccatctcaaaaaaaaaaaaaaaaaggagacaatgtttatttctatttcttttatagactttaattcttaaagtagttttaggtttatagaaatattaaagtacagagagttcctatatactccctctccttcctcctcccacccacagtttcctctattattaatatcttccattagtgcggttcattcgttaaaattaataaaccaatattgatacaagagtagtcactgaagtccacagtgtgcgttagggtgcactctttgtgttgtacaattctatgagtttctccaaatatataatatcaatacacattacagtatcacagaatattttcactgcccagaaaatcccctatactccatctattcatcctactccctccagcatctggtagccattcttcttttttactgcttccatagattggccttttccaggacatcacatagttgggattatacagtatgtagtttttttcagattggcttctttcatttagcaatatgcatgcacttaagattctttcatgttttttcatggcttgatagctcttttctttttcccactgaataatattccattgtatggatgcacctttatagtaagtcttacaagtctctatagcaggtcttagtaagttagtaatgtcagtcttctgactttgttcttcttcaatgttgtgttgtttattctaggtctttttcttttcatataagtgttagaatgagtttgtcaatattcacaaagtaatttattggagtcttgatagagattgcatcgagtctagagataaaactaaaagaactgacagcttaacaatagtgagtctttctatacatgaacatggaatacctctccatttatttagatttctgtagatttttttatccattttattgttttctcatataaatcttgtatatattttgttagattcatatctgattatttcattttttggtgctagtgtaaatggtattgtatttttaattcaaattccaattgttcattgctggtatataggcaagcacttgacttttgtgtatttatcttgcactctgaaaccttactataattgcttagttccaggaatgttgttttttgtcattgttgattctttgggattttatacatagacaatcatgttatttggtgaacagaaacttccttcccaatctgtatacctttcatctccttttcttatatttttgctttacgtaggacttccagtacgatgttaaatatgagtggtaagtgaagacatctttgccttggtcccagtcttagggggaaaacatctagtttctcaccataatgttagctgtacgttttctgtataagtatttatcaagctgaagaagttcctctctatttctagtgtgatgagaatttttatcataaatgggtattggactttatcaaatgtttcttctgtatctagttttatgatttttcttcttcagcctgttgatgtaattaactacgttagttgactttcaaatattgaatcagccttgtatatccagaataaatccctcttagctgtgatctataattcttttcgtgtatcgttggattcaatttgctaatgttttattgaggatttttacacctatattaatgaaagatattgatctgtagttttcgttttttgtaatatttttgtccggttttggtattaggtaatgctggcctcatagaatgagttaggaagcactccctcttcttctattttctggaatggactgtagagagttgccatcattttttcttttgtgtgtgtgtgtgtttcactcttgttgcccaggctggagtgcaatggcacaatctcggctcattgcaacctccacctcttgggttcaagtgattctcctgcctcagcctcctgagtagctgggattacaggcacctgccaccacacccagctaattttttgtatttttagtaaagacggggtttcaccatgttggccaggctggtcttgaacgcctgacctcaggtgatctgcctgcctcagtctcctaaagtgctgggcttccacatgtgagccaccgcacccggccattttttctttaaatgtttggtagaattcaccagtgaaaccatctgggcctgaaacttttttgttttggaagattattgattcaatttatttaatagatataggcctattcagataatctacttctatttgtatgagttttaatagaaataagaaattattccatttcatctaagttagcaaattggtgggcatagagttgttcataatattcctttattatcttttcaatgtccataggtttggcagtgatttttactttttttcttgagctgtaattcatgtaacgtaaactcaacattttaaagaatacccttcagcggcttttactatactcactaagtatgtaaccatcacaactatctgatcccagaatattttcatcgctccaaaaagaaaccctatacctattagcaatcactctccattctccctccccttatcctctggcaaccagtcatctactttttgtctttatgggtttgcttattctggacaattcatataaatgaagtcttatgatatgtggtcttttgcatctggtttgtttcacttagtgcatgttttctaggttcatccatgtcgtagtatgtaacagtacttactcctttttatgactgagtaatatttcactgtgtggacataccaagaatttctcagatacacttgaagcatttcaagtatatatttgtaattttatttctcaaatgcttgaatttatggaccaagattcatattggatacatgggagctacttgctcagagcaaaagaaaaagatgagagacagtatccaggtatgacccaagtttacctttctacatgagggacagtaagaaatgaacgtagcctggagtttcctctgtaaaaagagaatcctgcttgagtcttgtgggcttacataagctggtgccaccgccatcagctactacccacagtgagttcctactacctgtcagctgctggaagaggcaggcactttcacatgggacaatccttccaggtggtcattcttcatctctgttttacacataaggaaacgatggctctgagagataaagtcactttctcaggatctgcagcaagtgagagcaatgatgctaactcaggcctgccgaacaccaaagccctccccagctgtcaggtaacacctcgaattctctacccaattgctccagcagtaggaattcctaaacttttttgcaccatgggaccattcagcagtctgacatctacagacccctcttcagaataatgctttaaatgcatgaaataaaatacacagaattgcaaaggaaatgagttacactgaaatacaatggtcaaactatttttaaatcatcagatttatgaaatgggagtatacgttcttctcattaacacatgaaataataaaagcccagcagtgagtctaatcactgtgatcacctaaacgtagtaaagagcatgaatgacatttgaggtatctgcaacctcaaagtgacacgaaaacatctggatttctgttggtgacaaagtcacaggtgctactgatatgactgtggtttttgcctacgttcaaatgcgaacttcagttacaggtgagtgaaaataacgatgccacgtgttctccatccaagttcacggatgcctggctgagaatctctgctccccagaagctgtgcagccaagaggaatgggaacgtggcccctccctctcccagggactgtcattgccttttgatattcatgtattctggagtcctggtgtgagaaggggtcaccttcctgccccaatgtccttccctactccagaattcctcaaatctgcgtatttctggaaagctccaaatagagtgtttcagttctcatggtggtccccatctcagcttagtcttacacatctctctcaggacagtttaattccttttaaaaacaacccccagagagctgcggggagtttctaatctctcatatcaggcttcttgtatgacttcacaagggcagcccctaagcctgcttcccctgggagatgggggcctggctgaaggtgtggtgtcagagcctcctgcattgatgaaaacccaggagcagagcccagcagggaagagcccccaacctggggcaagcagctgggcacgtgggaggccctgcccttctcacctcactggggcctgtttagggaatggagaacctctctggacctgtttacttgaccataaaatgggagaggagtctctccaccgtggtacattatgaagttcagagctgctgcaagaaggcttaagaacaatcccaaagcaaccaccggccatcctcaagagctcatccctgacaagatgggacccaggaaaactcacgaagggacgccagcaaacagcagccttgtaacactttcctgaagatcccatacacaaaacgaccacagttcccagcctcctgcctgctaaggtttttttgtttgtttgttttttgtttttgtttttgtttttagagacaaagttttgctcttgttgcccaggctggagtgcactggtgcaatctcggctctgcaacctccgcctcccaggttcaagtgattctcctgcctcagccttccgagtagctgggattacaggcatgagccatcatgcctggctaatttttgtatttttagtagagacagggtttcaccacgttggccaggctggtctcaaactcctaacctcaggtgatctgcctgcctcgtcctcccaaagtgttgggattacaggtgcgagccactgtgcctggcccctgctgtgtttttgagagagaggcagggaggagctgagttgggacacagccagagtgtggacccagacctcctcaccccttcctcttctttattcaaggcatccccgctcctctctcagcctcagtgttccagtgggtaaagaaatgagggcccctccagctccactgtgacccagcagggaagaacaacttctgatcacagccacagcatccctgtgtgtcagcagcaggacaatgggagccactccagctgtcccagttgcagcaggtcctactgtgcagagaccactttgcttcctgtctaaccaccatgactgaggggtgtagcgggatagatatggggttggtggggaggcagagagtagggaggcaggtgcagggaggccaggctccacagaggcacgtggccaaggtgactcaccagcacatttccatggttctctggatctggccccctccccacgcagtgattcgggttgggggaagaaggcagcagaagacaagaaggagaaagaaaaaaaggggatgtgcagagagggaagagtgaccagagacggcttgaaggactaagttgaacagaataatacccttaaaacaccctgattctgagacagatgaaaggagttcaaaaacaaaaacaaaaaagtcaaaatgtacaccagcagccccaatgtttcctgtttttctaacaaatcaccaatgatttccaagaaaagcaagctgtgctgcgcttgcccccaggcacagccgcagaatttgcacatctggcctgtgcttcgagagcggcccacgcggcaccgtggcacaggatgtggcggggcaggcggcagggtctgcagggcaatgatcccgagaggagtgtggccaggaaccctctagggaacacctgccgtggttgtccctgctgcttgcggcctgtggatatcaacctgtcaccacctgtcagccagttcatcctacggcctccctcaatcctgcctgctgcattaatgcaggcatcgagatgcaggcagtaggacaggggaaaacagaaagatccccctatttactcagaagacccttcgggaggatttacatgtatggactttcccatgaccatctgaattctctgagaatttcccgttagatgggcgtgggggcttcagggaggctcagggggccgggtttccttggagacagggagctgacagctcaggtagaggcgaggtcaccctgccagctcctcacaacggggccctcatctcccatcccatctccagcttctctcccttccattgcagagggtctcacagggtcctggggtctttcaaaagcccctagagggaagggcagaccctcgagctggggctgaaatcagtctagtgaccccaggacctgtgccccttcctatcttggccacctcccaggaaaccacacctgacctctgccggcctgaccccatccagaaatacacagctgcccctggagagcccctccctgcccccaccctgcagcctcttctctgttccacccatagtcggagcctccttgcagctcctgcccccactgctgcctcacccattcctgccacctcacccatgccacaaccccccatctgcaggagctctgctcagccccaccaacaccctgacaggggcaggttcaaaagacagtctgcaggagggggtgaggtgtcttgggtgggaggaaggaagacagagggaagc[148 bp omitted]ctgcctcagcctcctgagtagctgggactacaggcgtccgccacc[174 bp omitted]cgccagctggacaaagcagatcacgtcatacacacacacacacacacacacacactttgctaaaacatttgaaagtgagttgcaggctgtggacatcatagcacatcactcctaaacatcagcttgaacctttttctttttcttttttttttcgtcaggagacagggtctcgctctgttgcacaggctggagtgcagtgacacaatcacatctcactgcaaccttgaactcccaggctcaaataatcctcccacctcagcctcctgagtagctggggctacaggtgtgcactacaaagcctggctaatttttaattttgtttgtttgtttgtttttgtagagatggagtctcaatacgttgtccaggctggtctcaaactcctggcctcaagcaatcctcctgccttgccttggcctcccaaagtgctgagattataggtgtgagccaccatgcctggccttgattgaatcatattaaacatgagaagatattagcaatttcgtggggttcaatctaatacttgag[135 bp omitted]accccgtctctactaaaaagtacaaaaattagctgggtgtggtggcgcgcacctgcagtcccagctgttcaggaggctgaggcaggagaatcgctggaacccaggaggcagaggttgcagtgagccgagattgtgccactgcactccagcctgagtgacagagcaagactccatctaaaaaaagaaaaaataaataaaagaaacattctccaaccttccaacctgaccacacctggcaaattgacaataattctgaaacattgtctgctgtaccctagggaatatactcctttttttttttaacttttattttaggtgcgggggtacatgtgcagttttgttatggtaaactcgtgtcacgggggtttattggacagattacttcgtcacccaggtactaagcttagtacccaatagttatttttttctgatcttctccctcttcccaccctctgctctcaagtaagccccagtgtctgttggtcctttctttgtgtccatgagttctcatcatttagttcccacttataagtgagagcatgtattttgtcttctgttcctgcattagtttgctaagaataacagacatcctgttattctattatgttatctattatgctgagaataatagctccatccacatttctgcaaaagacatgatcttgttctttttcatggctacataatattccatggtgtatatgtaccacatttcctttatccagtctactgttgatgggcatttaggttgattccatgtctttgctgtgtgaatagtgctgcaatgaacatatgcatgcatgtgtcttcatgcagaatgatgcattgtggtgatttctcaaacagggaacatacttgctgagcatctgttgtgtgcccatcatcagaagcacatcctctgtaaagggagcaagatgaattaatttatgaataaagctccttcaggcactagcattccatgattttattctggaatgatgaggttgtgtttttccttccctggggaatgaagagtgggaacataccctctggtgaaatgggaacatgggaccactcctatatccatctttactctccagacctgtcttcaggcttcaaaggcacctggctagggcaggaacacgggtgatcctaacggaagtaccaggacacggagctggagagttcctcagccttctcaagtgcaattcttgggaccctcctatatctagccatcctggaactttgtgatagtggcacacaggtaactatatccagggacctacacctaggcactgagacatgtgactggggaaaaatggcctacacttacgccctaatgtgttagttccgcaatttcctgctgaggttagcagatgaacgtccagcaagtccacagcaaatgaatacacttgagaaagtcagggtgtggaagaggttcttcctctccaggaagatgctggtgcttgggggtccaggaagccctgctgtggagcagcccagagacctggcaaagctttctcattgtttcagctgtggcaggcttctagccaaaccctggctcggcccctcaccccacttcgaagaggggatctacatcctccccagctgcaggaacactcactccctggcaggccctggcttcctatacactcaagaggcacagctaaggcctaggagttgtgccaggaaaccagccactggggtgggtcatttgattgacactagctccaagagattcttcccttacaatcagtaggtctgcctcccaccccagccacacacacacacactcacacccttcagggaatgagaaactggtcccagggctgtattccctccacctggcagccccttggctactccttcataagcgaggcttcactggtgacccagagagagcctgggacaggactgctagcagcagtgggaagaggaaggctgggcatcacagcaaccaccttgcactgggagtttctgctagacaggaggcaaagcagacatctcaaatccaccgtagtccagaaacaacacaaaatgagaactcctccccagaaaaatagaaagtacttataagattttatgtcccaaagatgatcccaacaatagctcccatcccacctctcctttacattacagccttgccacttctccatcaagaggtggaatctattcccatccccttaaacttgggtgggcttgtgactgccacaatcaaaacagattatagcggaagtgatgctgtgtggcttccaaggctaggtcactaaagaccatgcagctactgtcttgtttgccagaaggtttgaacttggagctctgagccatcaagtgagaaattagattatccatctggacgttgccatgatgtaaggaagcccaaaccacatggagaggccccttgtaggcattctcatttacagtttcagttaccagccgtttgatcttcccagctgagaccccagacatcactgaacacaggcaagtcatccctattgtgcccagcccaaattcctggcccacagaatccacgggcataataaaaccgttgcaatcttacactgctgcattttgggataggtaggtagttacacagcaatgtatctggaacatacacatctggtgtgactgccagccccttaccgagaccaggtccatctggtgtgagtgccagccgcttaccgagatcaggtcacatgcccagaagccactagaccacgtgttcagaaaagtccagatggaaaagctagaaagaaaactactagaaagaaaattactgtgacaccatccaccaggcacctaagaaaactactaggagatggtgccatccaccaggcacctatgaaaactactaggagatggcgccgtctgccaggcacctaagaaaactactatgagacagcaccatccataaggcatccaagataatcacagcaattcagaggcagaagggccctcagaggctgtccaacctaagtgtgtttactcaaataaaaattcttaccaagtgaatatgagcacaagatgctttgctgcgtgttgtggtagctgcaaagatgactaatacactgcacttcatttcaaatgctgagctgctcacatgccagcatgtgccccgccatgttctgaggactcgaatgaccacagcagcacagcagcccactcctgcctctcctgcctcaggaccttcgcgcctgccgttctctctgcctgagtgctcttcttctaggtgtctgcctggctcactccttcacttgtttcccttcttctgttctcaaggaggactcctgacaagccccatctcggctgcctcctgccttactttttcccacatctccctcacccatggacatacgatacattttgcttttgtactgttctcattatatttctgtaactcccagccccattagaatgtgagctccatgagggtccagctgagtgcctggcacataatttgctgaatgaatgaattgaaagatgaagaggtttgaaggaagatgagagagaagcgcatgggatgggatcacacaccccgcctgactgagatacagatgcggcttttctcgtgtgcatcaaaaaatgaacctagagccaaggtttaggactggcagaatctttgcctggatagcagcttggtagctgattaggttggagccgggctcttaaatgaatccctgctcctcggtcatctcatctgttggaaggtcaagttagtgatgaggaagattactgtcctatcttctgcctttaattctcaccaagaacaatgaaagctttgtgaaatagcagtgagaggaaaatggggagaaaaggacccatgactggggtttgtagtaatcacggaagaaaatgctagacatagtcagacgcgagtcatagactttatgaaagcagctatccaaggggctgggaattgtttccgtgcgtatctagtctattaaaacaacaacaacaacaagaggctggaagtcagagagggtggcttaacagggaaagaaaatggaaaattaagctctgaaggcaagtcagagagtgtcacaagggagaaaagaggcggaaatgtgaaggagccagtgtgacttcctggggcatacgtcaagatggaatcaaggtccccaagttaaggtgatacgaaagagagagaatgagcgtat[133 bp omitted]aatcccatctctactaaaaacacaaaaaattagccaggtgtggtggcgggcgcctgtagtcccagctacttgggaggctgaagca[137 bp omitted]agaaaaatgcagcatacatcaaaaaggacccgtaaagctattttcagagtccaaaccagaagaaatcaggccagtaactcaagacagtggccgacgcatgagagaaagccgaaatgcgctcctatgttgcctccatcttttcctccacttataagtaggagctaaagctttaccatgataagctttaccattgtaaggagaatggttaacccactggaaagcatgaatcacagatgttttatttagtcagcagaaaatatgtattgagggtctactatttgagggacttcactaggcactgggggtccagaaatctcacagagctcgtggccaggaggaggattgagaggtcactacacaatgtgaaggagcaacagaaaaatatgaaaaagacaacccagtagaaaactggacaaaaggcttgaatagacgcttcacagaagagggtgtccaaatggccactaaacatgtggagaggtgctccgcttcattagtcagaagggaagtgcacattcccaccacaaggcaataccactacacacccagcagaagggccaaaatgaaaaaggcaaaaaaaagcactgttgtgaggatgtgaagccacgcaaaccctcacggctgctgcggggaatgtacgctggtacgacaacatacccagtggaagatgctctatcagaccctaaagctcaacttcagcatgctccaggccccaggtatatgcctcctagctacatgcccagtggacatgcaacaggaagttcagagaagcaccatccaaaataactctcaaactagaaactacccagtgggttaggtgtcccagtggaggctaatatgggacaggtgccataggaacttggaggagggagaatgtctattagcaaagcttctccaaaaaggtgactcccgagataacatttcaggaaggaggagctgccctgggtgagattcaggcatgaatctcatggtaggaaaataaactgaggcaagaggcgggagacagcatggttcctttagggaaatgctggcagttcagccctactgaagggtaggcatgacatggggcacgctgggagatgatgctgcatgggctggcatggtagactgtgaacagccttatctgccaagctaagtgcttaagggtttactcaagcgccatgtggagccactgctaaatttcgagctggtgaatgacacatcagcttttggatttggaaggttgtaccagccacagggtgaaaggtagattgcggggaaagggtccgatattgaaacatctgatgccaaatagggaggcttgctgctgaaaatgagtttaggattgcagaagagaataaaggcatctcagagtcataaagaaacttgaggttgtgaaagggagctgctaccgattatctttgaagaatcagagaaaatgaaagatgtataagagacagagacagagaaagacagagacagattagaaaatgttgtcgtcatcgtgaggaacagaaaaagaaagggagaattctgtaatggcatttgcagcaacctgaataggattggacactattattctaagtgaagtaactcaggaatggaaaaccgaacatcatatgttctgactcataagtgggagctaagctatacggatgcaaaggcataagaatgatacaatggattttggggacttagcaggggaaaggtgggaagtgggtgagggataaaaggctacacattaggtacaacgtacactgcaccaaaatctcacaagtcacctctaaagaacttactcacgtaaccaaatactacctgttccccaaaaatctatgaaaataaaaatttaaaaacaatttttttaagtggaattttttaaagtacatgtctgagtccaccagtcccctggcaacattctctatacattattaaaagacagtttgtgaatgctaagggaaagatccaggaaccaccagcagccaatagggatcaatggattcactgactaaagaggtaatagaagaacagccacaatagcagcatatctgaatttgagcaagtcttgctatatagtttcatgatgatgtaaaaaatacgaatgataacacagatagatggattcattactggcttcataacctcacccaaagggtgttgagtagcttcatctgtagggacattgctcctaaaatgccagagaaccctgcctttggtcctttatagcatgattgtggtaaaatatatgcaatataaaatttacgattgtaagtatttttttaattccaacttttatgttagatacaggtgcaggtttgttatatgggtatattgcatccaggtagtgagcacagtactcaataggaggtttttcaatcctcacccttccctctctccccactgagagtccacaatgtctattgctcccatgtttatgtctacttgtgctcagtgtttagctcctacttgtaagagagaacatatggtatttggttttccattcctacattaatttgcttaggattatggcctccagctccatccatgttgctgcaaaggacatgacttcattcttttttacggctgcatagtatttcatggtttatatgtagaacattttctttatccaatctaccatcaatgggcacctaggttgattccatgtctttgctattgtgaatagtggggtgatgaacacatgtgagtacatgtgtcttgttggtataatgagctattttcctttgggaatatacccagtaatgagatcactgggtcaaatggtggctctgttttaagttctttgagaaatctccaaactgctttctatagtggttgaactaatttacgctcccaccaacaatgtgtaagtgttcccttctctccacagcctcgccagcatctgttgttttttggcttttcaatagtggccattctgactggtgcgagatggtatcttgttaaggttttgatttgcatttccctcataatcagtgataatgagcattatctttgatatgtgtgttgaccatttgtacgtcttcttttgagaagtgtctgttcatgtcctttgcctgtttttaaatggggttatttggttttggcttgttgatttgtttaagttccttatagactctggatattagacctttgacagatgcatagtctgcaaatattttctcccattctgtaggttgtgtgtgtacagttttgtgcgtacagttctaagtatacagttcagtgacattaagtacattcacaatgttgtgcaaccatccccaccatccattcacagaactttttcgtcttcctaaactgaaactccatacccaataaacactaactccccgccacttctccccccagcctctggtaacctctaatctactttctgtttctatgagtttactctagctacctcatttgggtggaatcacacagtatttatccttttgtgtctggcttacttcacttagcataatgtcttcaaggttcatgcatatcgtagcatgtgtttgaacctcattcctttttaaggatcaataatattcaattgaatgtatatacacattttgtttatccatttatccattaatggacatttgggttagtttgaccttttggtgtagcatgctgttttttattaatagttttcagcagggcttaggaggcaagcttactccacaacagaagggataaagaacatctatgtaacagtgaagattcacaaagttcaaatgtggatgagactcaaaattgttcttccatatctattctccttccttctatggggatataacttttaggaattttagatcacgtttcccagactcttgtaactaagtatgaccatatgactacattctggctactggaatatgaatagacattgataagtgcaatttccaagtcatgcttttagaaggaagaggcatgcacttcccttccccctttccccttcttgctagctggaatgcagatgcgatggcaattgctagagcagccattatggaccatgagatgagagctacatgttgaagaaggcagagcaatgacacaaaaggaaccttggttcccaacctataaagctgtcatgtgaagtctggatcacttatgcccagcttgctacctgagacagaaataaacctctatcttgtttaagccactattattttgggtctctccaatccaacagagaaaccagtagaccaactaatatttcagtgaatgctgagttacctaataagagaaatgatgtttttgtttttctgttactatgccatttagttacagctggtggatttcccctgaatttgtagaatatggtttatggtctgacttaaagaccacacggtatacccaaaatttccttgatagagacacctcataaaaggtgaagtcatcctacagacatgacttctggagcacaggttttctacatggagtccccacctctgtgtgtcctactctagggagagcagcagggattgagctatttaaaggccagacactcattggagcaaactgggctggccagttagtattgaagcgacttaagtcgagagagtaatatttttataaatgaattaggggtaatctcttactggtcaataaagtaccatgagaataaattatgggcattattacaaaattttttctccttaaacaaggtcagatattttagtgaaaaataacattttcacctccatctactgagcagatcttcggagtaacacagccaacgagaagtaagcctgcagctttgaaaatgcaggaaaggtagggggaggaggggagatgggaccctctgaggccactgagctctggacccaagttgcaactgtggccgttatcatatgattaccatggctgcaacccaatcccttcaacagcccctggacaggagccttgatgggaacctggcagagttgagccatggtccaagaaggagcattcttgaccagctacatctatctcagaggagagtgctggactgtaatagcacagtgccttggaccacagttgggagaatgagggaatgggaagttggacgcctccttctttattcattgcacccattacatggtccagcattgagggcttgcttccatcaacttccacaagtccccaccatctatctgctaggcaactcaagtaccctctagaacagccttctgaaccaactcccaaatgtctcacatgccttggacctgagctacttagcctcactagttcagaaatgtgttttcttgatgcttacataaggctagtccttgttcaactccacccatcatctccctcctcaaccccaccctttaggccaagctctgcctctctcaagtgggaggtttttattagcaagttctttaaagggccacacccttatttttctcttgttttgcacagtaaagcaaatcccctcacaccaacagctatcatagcaccgtgacccacaggctaatgtgttgaactcacaggagcctttgcaccttggccctaccactggccagctcacatttggcatcaaatgggttcagaggatggattcaccactaaaaacaacctcaggtcttcagaagtcaggtggtaagagtgagccccatcttttgatcacccactcttgggttacccacccactgaagaggggaagtggactatattcctgtccccagggccaagaaagcccaacccaccttccaagacctttccagatacttttactgaggcccaagagacaacaagggctctggacacaagctcgtgtttctgtgagagccatggcaatggttccaggttggcaggtgtgtgtcctagggctgccacagtccttggaggaggcagagggtccagtatcagcctcctcagcccatttctcagatatgcacggagagagtgtcactctccatcatgcatgagctctgaattggaatgggggagttatcgctcctggggagtaatttccaccgctctccccttcccccagaaagtgctctttcctctgcaaaaaaaaagaaaaaaagaaaaaaagaaaaaagaaaaagaaataactttgtccttgcttactctgacccaagctcccccggcttgggagtgagaaaaggaagttttttgttctagagatttccacattagactcagagggagggctacttttgtgaaaaatgctttgtatttttgcaaggtgcaaaggaccatatgcaaattaatcagttagtaatactttaatttgctcccaatttttaaacctgaattttacatctcccttgtcctccagggtcaagtaggccaggcaccccctggtgatgttcgaagaatctccagaaatccctcaacagtttcttcgccttactccctctgaaaacacagctcctgattgccctgattgccccacagcctggcacgggcgggacaggaagcccctctgccttgtaaacaccgtgttgcaaacagacacttccccaggctcttatgcagaagctgtcaccagactgggagtggcttgttgggggaaggttccccagggcttcccctgctctcagacttagctaactgctcatcttaaatctgactaaatgggagggtggtaagaagattccctgccgggtgcggtggctcatgcctttaatcccagcacttcgggaggccgaggcgggtagatcacctgaggtcaggagttcaagaccagcctggccaacatggtgaaactcctatgtctactaaaagtacaaaaattagcctggtgtagtggcgggcacctgtaactccagctattcaggagactgaggcaagagaattgcttgaacccaggaagcggaggttgcagtgaactaagattgtgccactgcactccagtctgggcaacaggagcaaaactccgtctcaaaaaaaaaaaaaaaaaaaagattcccaagcagagggttctcagcacctggagtttgcatctggagtttgccagaggctcaggggtctgaagcagcccagaggaggacacctgccttgtcccacagtggatcacaaagccactggtgtctgaagcccttgcagttgtgcacagaagaccagtgatatgtctggagggtccttgaggggaggatgaccgaaccccacagaggtctcagatggggagcagcccagcctgcccgatcatcagtcatccaaggctgaggcccgggcctcttccatgctggctgctcgaccaggcaatcactcattcagcaagcactgattgaatgacaagtgctggcccctgcaaggcactggagagtcagcactgaacaaaatgattggaaagcttccctcattgggaaggggatgagtgaggcaagaacacacgttaggtcttgggaaaactgagtcaggcagtctggctggaggagagcgtgatgattcgtggagaaaggagtgggactcaacttcgaaacctgaacagaagactaaggactctggactctccctaagcagtggggtgccatcaaagtatctgaacacagtgacatagaagttttcataagaagaatctcctggtgaagagaggaagagcctgtggtccaaaaggcccaccagaggcatatggtaaataaagccaaattgggtaggagagagaacaatggggaagtgagagaaacaagagccatggagaaaggaagcaccatcaaaacgggctggggagtggggaacaaggaagatggagggaggactcggagatgagtccaaggtttcaaggctgggagtctggtttcagcagagacagaaatggggaagtctgcacaggaagcctgctttgtggatgcagagttgggctctggatattgctcaagttgaaatagggcatcaagtgaaaataacccgcatgtacttggaggccgaagcaggtagatcacttgagcccaggagtttgagaacagcctgggcaacatagtgagaccctgtctctacaaaaaacacacacaaaaaattagctgggcgtggtggcatacacctgtagtcccagctactcaggagactgaggcaggaggatcatctgagcctggggaggttgacactacagtgatctgtgatcgtgccactgtactccagtctgggtgacagagtgagaccctttctcaaaaataaaaaataaaacaaaaatttgtcgggcatcagactttatggagacttcaaaaaaaaaaaagatgcaggttgggaagagactattggaacttgccattccagagccaccagtgacctgaaaggaagccttccagcagaagcatgggctagagggtgggtttctgccattgaggtctgaagagggactcatagtcactgggagtcctgtcataaggtggcaccatgagggaaggagcaggtcccctctctgctcagcccatcagagcagctcccacaagaaaactcttggagagcaggctttgaaaactcccaggtggtcagaatcatagagtccagttggtccaggaggaaacagactcagcaagatgaggaagtaattaggggccaggactagagattacatctcctattcccatcctgtagcccgtacatcacatcacagccccctgtgttctcttaagcacaataacaggccaaggagagcgcagagcttttcgttttctcaaaatgaaactctcaacatggtacagaagtgaatgcacagtgcaaagacctatgaaacattgacgtgaaaaccccaagaacaagaggacatcaattcccagctcaacctggaggtgagataggttggccccaagatcttatctgggacactcacggaggaaggcaattttgaaatggtgttcaattagtttattttaccaagtatcagaaggagccaagaacaagagacctcaagaaaagcccatgctcccagcagaggatgtgggcgaggatcccagtatccatgaatggctatggttttctcacagccaaggtgcttctgctgcggagaacgggctgtgaagcagggctgtggggtttctgagcaaactgcccagctttgggacctgtttattcaaggtcactgaactactcaaactcaaatcatgttctcagaacaaccagcgtttacacaaccagtcagacatggccaccatgatttagagaactacaggctctttaaaaataagctatattggtctcctttctcacggctatcatttccataatatataacatgtattttccctgcatacttccccaacgggaaactagccaccacgaagcctcccattccactgttgacctgctctgaatttctctgagatcttccttctagtgagctggagtctattttcttacaattttccttctgtcatcccttttccattccagagaatgacacccagttgagaagtcttcacctttttcaaaggacactgctcgtcaaacatctgaagacagatactacttctcctctgtcttctcttcttggagaaaaacctcgctacttcttaattacttcatattctgtcatcgctatcctggtcacctatctctggatatgaagtggttgctcagcatcctccaaatgcagcacctggaattcactcaaggtggatatgcccagttcagtgtggaaataggcatgcttgttagctgaagggcatataaagtaaggacccatgggacctagtggctgaacattggaagccaagaatcaaagatggctctcgggcatgagcctgggagctctgaggtttacagatttgtacctgggaggactgaggaagagagaagagaaggaagcttggggagtgggaagccaagaatcccacagtggaagacctcaagactggagccgttctcccagcttccaaggagcagctcattccccgctctataagctgtcacagggcgtgggagaaggtaacgtgcttccaaaatcatttgcaaagtcagtatatcaaaaactgacaacggcagcacagaaaaggaaaatagaggtcaaattcatttcatgcaaaaatcctaaagaaaggtgggatgcggtggctcactcctataatcccagcactttgggaggccaaggctggtggatcacttgaggccaggagttcgagagcagcctggccaacatggtgaatccccgtctctactaaaaatacaaaaattagccaggcgtggtagtgggtgcctgtaatcccaggtactcaggggctgaggcatgagaattgtttgaacctggcaggtggaggttcgcaccactgcactccagagtgagactgtctcaaaaaaaaaaaaaaaaatcctaaagaaaatcacagcaaatcaaacctagcacagtactgaaggaataaagcaccttgacccaattgagtttactccagaaatgcagagggctcaatatgtggaagctaatgatctaatgtgtcacataaatctatcacaaggtgaaagagtacaagagtttccttgcagatgctttaaaaaagtattggacaaatgtaacatccattcatgcttttaaaaatccttacaaaggaggaattgaagaaaacgtccttcacacatggcactttacatcaaggcactggttctaaagaactatgaccacatcagagaaacaaagccccaagctcatgcctgtccctgggaacttgggaggttgcagacttttgtggcaaaggaacagtcatgcatgcctctctgatccgtagactgtttatattcatgtgtgtggccacagacacctttttttttctctctctctttttttttttttctgagatgaagtttccctcttgttgcttgggctggagtgcaatggcgcgatctcggctcaccacaacctccgcctccgtgttcaatcgattctcttgcctcagcctcccaagtagctgggattacaggcatgtgccatcacgcccggctaatatttgtatttttagtagagatgaggt[135 bp omitted]atgggctgaattcaaaacttggtgagaaatccaacaacagagcagtggcccagtgtgcagtcatgagatggcccccagcacgccgcttcagggttctcaccagtgagtcgctaccagtgtcctctacacagttttcattatccatcactacccccagcttgcttctgacaacagcttcctcccacagggagctgtgctggggataatccaaagaaatcagcacacagaaagtcatgttttctagaacaggagttattaacctgggtcccttggtgaactgcagagatccaagaagaccttagaattttatgcaaaactttgagcgagagagactgtgtgtgtgtgtgtgtgtgtgcacatgcattcacatgtacatgtgtgcttatgggtgacgagagagatgatctttcgctttcatcagtttttcaaaggggccaactatctagagagagtttgagactctcctcgaagagttgtcagtgtagatgtgatctggttgcagaacgctcccccaggaggctggctggctcggccaggttgggtggaagtggctgtatggagatttgcctgaaaagggccaaaccaccaagccatgcaggaacaaatgctcaggccaaaaacccagtgatacgtctgcacagacttcatggttctggggagaaagctttggtggaagaaggatatgggagctggacaagtgacttcctagatgagacagacaatccagatcagggcttctgaaccctcccagaacagcggctcctaagaggaacagaatgaaggcctggcaaaaaatacggtggagttttctgtggttggggactcaactccctgagctgttgatggagatgcacaaatgcagagggctcctgagcgggacacgctatctggtgatggtcagtggaaaggagaagagaggcccccccattagtattgatgacctcagcgtccataagctggaccttggaatacggggaggggtgaggaaggtgggaacgagtccctggtctgtgtcagacactgagaagggtgcttgccagtagtgctatcatctgatcctcacaggagagggagcccacataccccacacatgagatgttgaaaagaatgctggagagaatgcactcaaaaagcccttagcaagtattcactacatggtaggtattagtattatgattgttatgattctcttttactttatatctttcaagtctcaactcaaatatgacttcttcagagaaacctttccttaacccctcaactatattgagttccctttccataatctcatagtatcccataattctcacaattgtaattgaacaatatgtgtgttgcatgtcttgtctatgagactgtgagttccacggggcaggaacattgcctgtcttgctcagtgtcctcagagcttggcacatgcctggctcacagaaggtgcgctccatgcagaagtgttgaatgaacaagtgaaatgttagcgattaggcaggggccacataaagcattgagtgccagatttccatcccacagatggggaaactgacatgcagagaggtacatggacttagcaaagatcacgtggctaggagttggggagcctggcaggaactgggctccatgtgagccaccttcagccctcacaccccagccctgcactctaacaaggaaaccacacaagctcatttgcctaggtcaacaacaacaacaagactcctgaggacatgaaaatgaaaagcacaccactccctccgggccccacccccagccccccaccccatcctgtgatctggcaacttctgctgttgctgtgcatggacgccttgcttgtgagatcccagggagtttcagagtgacagcctgacgccatgctgaacatcaagtggctagggtgagcaggccatagctgtgccaggtcactggtccccctgtaggcctgggcggtcagtgctatggtgcgaagacatagaaagcacaatgaagaaggagggggcggtcagtgctgaagggcaaaggaagagcatcagggaaggattcagaagatgaggcttgagctgggcttctaggaggaactggcagttcaccaggcaggcagaggcagggaagagcaatctggggagaagcaacagcacacgcaaaggtgcagaggtctcctcaggctacaggagaggaagaaggaggggtggacctgggatgggtggtgggtgtggaccgtctctggaaagtcatgcagctctgcagcgttttcagctgaaaagtgactcacgcaggccgggcgcggttgctcacacctgtaatcccagcactttgggaggccaaggcgggcagaacacctgcggtctggagttcgagaccagcctggccaacttggcgaaaccccatctctactaaaaatacaaaaattagccaggcgtggaagcgggcgcctgtaactccagctactcgggaggctgagacaggagaattgcttgaacccaggaggcggaggttgcagtgagccgagatcacggcactgcattccgtcccgtgtgacaagagcgaaactctgtctaaaaaataataatttaaaaaaaaatgaaaataaaagtgactcacgcagatgtgtaatcttacatcaccatggcagcaggagagaagctccatggaagcaggagtctcctgtggatgccgaactctagggcccaaagtctagcaagccacttgatagactcagaagactcaagaaggacccaggatcttctctgtgccatgaaagtcatccatttcttcccattcatcagcccccaacccccttttgggtgtaacttgctgtagctgtgactcacttatctggaagtcacttaaccgataacctcaactatccagaacctagctgctatcctacaagcaagcaaccaaacaaaagcacctcgtggccacaattcatgcccccaaattgtgttgtatggggcatgcgcttgacacccacaggaacacctaggccaccacttaggcttggtcaattctggttaagagcagacgccagagtcagcccagctctggcaccacctaaatgtgtggccttggccctcggttttctcatatgtgaaatgggggcaataattgtagctacctcagagtgtgactgtgaagattaaaggacatgacatactcagcacagtgcccaacaccatgaagtcatagccaaaggagaaaaggacagggagaaagatgaaagagaacgaagcatgaatgtacaaaaagacacagggtacaaaagagaatggcaggccagaaccatttgatgaaaatttcaagaaattattcaatcatatccaacatgctacatttataaatgcaagcaacatactttacaaagatttcttttaaaacataatacaatgaaaagttctgatacttagaaggtagagctactggaaaaattaatgtatgaaagctatgagaacaacataattctgtgtggacctgtgtatcgctaacacatcccccaaatctataaaaagtgcactgtatttaatagaatctaagatgccatcaattgtaagatgcaccgttattttgtgtggcaataaggaagaaatattgttgcctattataattggaagatgccataaacagtaaaatgcaccttgatttcagtgaaattcatacaattagcacattcagtgctaaaatgtgaaaatatgtacatcttcaaattgatgaaatattttactatgtaatatatgtttgctacgggagggtatcatcttccctttgggcagaagtcagatgtactctttcctttctctcctcccaccccatctatatctgaggctcaaaaatcaaattaaacacctctcccttgacttgttaaggatcactctatcttcttcttccaggagctttctctgttttttaaattttattttttgtttttgtaaagacagggtctcactctgttgcccaggctggaatgcagtgacacgatcatagctcactgcagcctcgaactcctggcctcaaagccttggcttcccaaagtgctgggattataggcatgaaccactatgcctggccagctttctttcttaacacattggttcaggcttttagctcaccagctgaggccaaacaggcattctggttctcagaggtcccacagggccacgcagctcagtcccttgggatgagcatctttgaagaaaggccaagtcagcacagcttgagtgctcagtggaacccaagctggggcttccaaactctaggctacccaggcaaaaaggatcctggctctcctcctctcccactcctcagccagcaggcccctgatggatggctaacacaggggtatggagcagcctgcacccctgccttctcatcctcatgccaacatcaaccccaaatgctcttgtcacccagtgccaccagttagcatccaacctattcttcttcttcttcttctttttttttttttgtttgtctgtttgcttgagatagggtctctctgtgtctgccaggctatagcgcagtgaagcgatcatagctcactgcagcctcgaactcctggggtcaagcaatcctcccacttaagcttctcgagtagctgggcaacctgttattcttgagggcaataatcaacagtgaatgggagggaggaaaggcaagcagggaggcagagactgtctgcttctactgcagcctgaggagggaagataatgaatcatccctctcgtaagctagagatgaaaggagggaggttcttaaaaccctaatgaggctcagcacacaaagaccccaagccttcctgccctcacagtcctggtttgtgaggcttcaaaaagcaggggagggagccctgaagcaagaaagtagcttgaccatccaaaactgtcttctttgtcttccacgggtccacaggcaaagacccacaccaccacagccacaacgaggaaacacggaagccagcgttctacaaacatccacggagcatctcccacgtgcagccgttctcatcatacatgcctcacttaattttccacactgggccaggcacagtggctcatgtctataatcccagcactttggaaggccaaggtagacggatcgcttgagctcaaggaatttgggaccaacctgggcaacatggcaaaaccctgcctctacaaaaaatacaaaaattagctgggcgccgtggtgctgacctgtaatcccagctacttgggaggcggaggcggaggattgcttgagcctgggaatttaaggctgcagtgagccatgatcacgccactgcactccagcctgagtgacagagcaagaccctgtctcaataataataataataataattccacacagctctatgggtcagtatgacagcccattttatgaatcaggagactgaggctgggttgggggacagtgtgatgctgcaggtcacacagctggatccggttggaacttgggtctcttttccacatcatgcatggttcccaagcaacggcttcagcatcatcacttaaggagctcattcaaagttttgaaaactacagattccagatcccatccctggaaagccacgttgtagggttggctccaagagagccctacctgcagtcagctctgggagccagtgccttacaggtggtcctgagggcaggaaggaaagtgtggggtggatgagaagacacagaaggaaaacgagggtgtcagtccagagaggaccttggaggcaggcttggcctacttttagcccttattctgcctaaacccacccctcctctctactccgagtcttgttaactcgctttataccacatcctgctgctttaacctcgccttccttttccttctgaacaatctccttcctcctactgacctgaactttttgtgtatttaccccaggccgggatgggccagcacgcgcacatgcgcatgcccacacacacacacacacacacacacacacgagtcacgcggggatgtccagtgtgtaaacacagatcctctgagagcagaaagcgtgcagttctctaggacagcagccgcgtctgggcccaaggctggctaactagcaggctgagtgaggctcgacggagggcgccttacgcgggcacttccatgactcccaggttctgacggcacaagagccctgatgcccacgctcacggacagttccccgctggagcgggcaggggacctgaccctacgacacagggcgtcctgtgtcagaggcaggaggctgaggacacagctgcgcagagccgcccagcagaggttacccggataacgataagtggtccccgcgacgccccttaagtctctggggttatctggagcgcaggtttgcagacccgctgcccccgcggtgggccaggtccacggggccggaagatagcaggatctgtccagccctcgggctgcggcggctgctcgcggagcccactctccccgacggtccccagcttgctccagctctgcctggagctcccatgcgtgccctccgcatccgccctggccgcccagtcacacacctgcagtccccgccgggcgccgagcccctctccagcggcgactccctgcgattcgggtgaccgtcgggaccaccgcgccccagctggagccgcgcggcgagccgcagcatctgcccagcctgggctcctccggcgggcggggcggagcctgtcagggggcggggcctaatggggcggggctgaccgcggagccggcctctccagccacctggcggcccggcagcgtcagccaggtgcgcgcccggccccacatcctctgggtcacgcccccgaggccgcaaggcgtctgagaagcagccccggctctgacccgccagccctcggaagaagcagaccctggccggtccatggcagtggcccgaggggcaccagcgcggagcaccagcgacccccaaggagtaaggggaggttaggcccccgcgtcggaagcgcggctttggccccgcaggagggctgggcggagcaggggggcaggtctggggtaggggcttaggggaaagacgagaaagaggaagctccgacgagctgcttccttctctcactgcgacccacttcctcttcctacttctattttctttcttttttttttttttttttttgagatggagtctcgctctgtcgccaggctggagtgcagtggcacgatcttgactccccacaacctccgcctcccgggttcaagcgattctcctgcctcagcctcccgggtagctgggactacaggcgcgcgccaccacgcccaattttttgtatttttactagagacggggtttcaccatgt[133 bp omitted]tgcctgcactactgctgtgcagacgggcaccttgacccgcatccttctgcaggaaccttcatagaaataccagccagtcccggcgttcagcactgctgttccagcctctggctggacttcccgccctccctggccggcaccaaggctactgtcacctgagtggtttccccagcccctggggaagggagtgagggtgtgcgggagttcctgcctccagggtcaaggccctcttcttgcctcccccttttctcccccagacgacgttgcagatgatgctctaccaagagttggaaggactccccagggaatcccacaagacactgcgcttcctatgcctcctttccctcgtttaaaaaatggggataagaaggttggctactgctccgacagccctcacaatggaagagtagcacttcatttgtgggttaacaaagggcaacgctgaaatctccacttccactattgaatggaactgtgtcataatatctgttagaggcgtgcaaactcggccacaaggtcatggtcatacgttattgttggtcaaaagccgcagccctacctgaggctttgagagatatgaacaccaatgacttttcttttcctgactcccgaaataccaagaaaaagcaacttccccaaatggacagaaacagaaagtacccttggttgaacacagaggcctggttccagccatcgttagacgtgggaaggaactcagaccccctctcctacctcatccccaaccccttccccacacgtcaccctttcacagagaaggaaccagagccaccaagggctgagagaggacttgataaggattccagtcttctgtctcccctgtccccactttttccaccacaaaaatatggacatttggaagaagaggagaagagggaaggtacacactgtgcaaaggaagaaaatggcagaaatgctctggaatcaggaattcaggagcaagaatgacactgtgtgccagatggaaatgttggattaggagagcacttggaaaggcaaataatctgccagagaaattatgggatgcctgccttctgaaaatggaggaaaactgcaaaagagtggctcattggtgctcactcctagggctctgagcatcccaagaagccaacttggtcccatcgtacatcccctcagaagtaggcattctcctctccacctacagctgtggcccagatgtggagcctgcatgttatgccacgccgtcaacactgagttctgtctgcgtctccctgtcacagatctgatcagcacctgacacctatccattctccatttcccacctccccaaagctgctggaaaaactctgaaaggtacctctgtcactcattaagcatctgattatgtacctctttctacaactcctttgttgctttgttttaaaatctatggctctttgaaatcactctccttcctttcactgcctaatgttttcaaagaggagtctacccctgcctccacttcctcatcttacatttattcctcaattctctgaacagagaccaccagggaaaccccaaatgtcaactccaatggtttcattttcttacctcactacagcatttggcaccactccttcttgaaaatcccctccttggcttctcctccacctctcaccatgatttctgttttcttcttctggcttcatttcttcatcatctcttaaacattacaatgcttgagatttcagataaggctgcttctcttctccctgggcaatctcatccattcccatcatactgatccctcccaaactatcgcccagacttctctcttgagctccagatctgtaattccaagtgttttctgtacacccatacctagataatcaatccaaaagccttttaattactccatgacctaaaataaattcctcatcttctcccaaactccttctcctgccttccctatctcagttgacatcattactatccaccagtggatagtaagatttctagtaacttatagccagaatatataaagaactcccacaactcaaaagtagtaaagacaaagaatccaatttaaaaatgggcaaaagacttgaacagacacttcaacaaaaaaaagatatgcgcatggccaataaacacacgaaaaggtgctaacatgatgagtctttggggaaatgcaaacttaaaccatgagttaccactttacagtcattagaatagctaaaattcatactgaaaacaccaaatgttggcaaggatgtggagcaactgaaacactcatatattgcttgtaggagtgtaacacggcacaacaagtttgggaaactgattggcagtatctaataaagttaaatatacatctacttgtgacctagaaattccactcctaggtatatatccaagataaatgaatgtatatatccccacagaaacatatatatgaatgactgtagcaactttatttataatagccccaaactggaaacaccctaaatatcattaatagtagaatgcattttttgttaaattgtgggatattcgtacactggaatgctactcagcagtaaaaaggaataaatgactgatgcatttgtccacataggtgaatctcacaaaaatgatgctgagcaaaagaagccagacacaaaagaaaatatagtgcatgattccatttatatgaagttcaagaaccagcaaactaacttatagtgataggagtcagaatgatggttatcttgggggaagggaacaatttagccagaaagtggacatgagtgaactttctggggtggtgtttttatcttgatggtggttaaatggtttctgcatatgcacaagttagtgagatcttcacttaaaagttacatattctgctctttgtaaattatatcccagtacataaaatatgtgagaaaagaaaatccacattggtcttcctgtcacccagtgcagtggcatgatcaatgctccctgcagcctcaaattcctgggctcaagccatcctcctgcctcaggcatgcctagctaattattattattattattattattattattattattattattattaatttggtagaaatggagtcttgctgtgttgcccaggtaggtctcaaactcctaggcttaaacaatactcccacccgggcctcccaaagtgctgggattacaggtgcaagccactgtgcctggctgacattgggcttttatatcttcatgcccttcctctctctgtcctctctgcttaaaatacctctctccacttatttatttgactgaatgcttactgactattcatgataatcaggagaaccacctcaacttctattccagaataaatatagactccctcctggtaaaaataaacagagagagaaaaagtaatgatatgaaaacacaaaaagattcagactttcaacagaacggaacatggtcagagaaaattagtttcctttgaaatgaaatttccacaagaagaagaggaaaaaaaattaaacatctttctcttttatgtttttaataatatttgggaggatattgtatttgcaagtgtagtggattatgtaattacaaactgaaattacaaggaatcattaagaaattacaaactgaaattaggaaacatttttagcttgctaaatttaaacctcaatggaaacaatgaacagaagattgggaaccgaagaaagctgaatgtgtgacccagaactcaagcttgaaaatttatcctggaattcagaagagaaaagatgatctgtgatagctagactatagaggtctaatatgtgtataacagtaattccacaaggagagagaggagaaaataaaatatatggcagaagaaattttctctgaactaaagaaagatttgcatcttctactcaatatcttaactttcctggtaagacatgaattaccaaaaattgacttaagaagagatacactctgaatagaccaataaccatggaattgtataaattatcaaagaacatctctcttgaaagtctccatgtcttggtagttacatagatgacttctatcaaattttaaaggacagaattctaccatgcttttaaaaaatactaccatgaaaaatatagtatgctaacctttcatgtaaaaaagaaagagaaataagaaaatatgcatgtatcttctcatttgtagaaaaacaagtataggaaggatcaaccagaaactgatgagattggttacctacagtggataggtagggatagtctggaaagaatgggagattgggggtaaggatagaagggatgggagaaatgacaattctctgagtatgctgtttgtacagttcttactttgaggaccatgataatgctacatatatcctcatctcaccctaaagtagtaagtttacatcaatcaggatgtgatgggaacccaaaactgaatatgaacagtaacaaatgaacctattacaaatgaatgatataatcatactgaggaaggagaagacaaaaggaactaaccaagtaacatagaaaaccatattttgactacatactataagtatgtgccctgtccaaatctcatactgaaatgtaatccccagtgctggaggtggggcctgttggaaggtgattggatcatgggggcagatttctcatgaatggtttttcaccatccctcttggtactgtcctcttgagagtgagttctcatgagatctggtcatttaaaagtgtgtagtactgggcaggcgcagtggctcatgcctgtaatcccagcactttgggaggccaaggcaggcggatcatgaggtcaggagattgagaccatcttggccaacatggtgaaattccgtctcaactaaaaatacaaaaattagctaggtgtggtggtacatgcctgtaatcccagctacttgggaggctgaggcaggagaatcgcttgaaccagggagtcagaggtggcaatgagccaagatcgcaccactgcactccagcctggcgacagagtgagactccatctaaaaaaaaaaaaaattgtgtagtacctcccaccttggtctctcttgctccttctctggccatgtgacatgcaagccccaactttgcattccaccgcaattgtgagcttccagaggcctccccagaagcagaagccactacgcttcctgcacagcctgcaaaaccatgagccgattaaacctcttttctttataaaaattacccagtctcaggtgtttctctatagctatgtgagaacagactaatacaaaagctaaagatgaaaaaaaaaaaaaaacaaaaaaaaacacaacttgtaccacattgtgttggtattactgcttaaggggtctgttttctgatgagcaaatctatatctcacaggtatatgggttagaaattctgaaactcttttatatatatatgtgaagattgaacaaataagtaaatatattgtgaataatgagagccaagtttttcggtgttgaggaaggaagttacaaacaaggaaaggtggaaggctagaatgaatgtggtggtgttagatgagaattggaggtatcagtatatactcatggtttttaatagttagatacatagataaatatatagataaagagatatagatgtatgtatatttcccagctctgatgatggagcctagaggtaatgatatcccactagggatgagcacacctagcttccagatcttggtttctaaatatcatccttcaataaaaggaaccagagctccttggaggaatgtctgattgaagggccatgacagggaaagaacaagatgaatctagaacatcttgtggtactagaaaataataaagtgctcaaaaaatgattaatgtttgtcaaaagaatgcaataaccaacttgaaggggctcccagtgaccaaatccagaacaagctgagtaacacaataacgatagttatgggttatagcttatagaataaaataagtagccaagagtccataatgacataaaaaaattggataaatacatgggggagaattgacaaccctttcttacagtggaatgccagtgaatacatgtagaaggaagatggaagcagaaaaatcaccatttggtaaacatcacagtaataatttttgcaggcgaggatcatcaatgggttgggcacagtggctcacgcctgtaatcccagcactttgtgaggcca[134 bp omitted]gaggcaggagaatctcttgaacctgggaagcagaggttgcagtgagccaaccatgccattgcactccagcctgggtgacagaacaagactctgtttcaaaaaaaaaaaaaatcatcaatggatgctaaatgcagtgagcaaaaatatgatgataaatggtgctgtggtctgaatgtgtccccccacctattcacacattgaagcctaacccccaaggtgatggtattagaaggtgtggcatttggggaggtgattaggtctaggtgatgagggtggagccctcatgattagaattagtgctccaaaaaaagaagcctaaggggccaggtgtggtggcttatgcctgtaatcccagcactttgggaggctgaggcaggtggatcatgaagtcaggagatggagaccatcctggccaacatggtgaaaccccgtccctactaaaatacaaaaaattagccgggtatcgtggcacgtgcctgtagtcccagctactcgggaagctgaggcaggggaattgcttgaacttgggaggcggaggttgcagtgagccaagatcacgctgctgcactccagcctgggcgacagagcaagactccatctcaaaaaaaaaaaaaaaagcctaagggaactgccccttaccgtgtgttgcaccacgtgaggacacagtcagaaggtgctgcctgtgaggaagggcccttgtcagacatcaaatctgccagtaacttgatcttggacttcccagcttccagaactgtgagacataaatgtttgttgtttataagccacccagtgtatgattttttgtttatagcagcctgatcagactaagacaaatgagacatttgcttaaagtagcacccaacaaggtatttttgtttttcagacagattcttgctctgtcgcccaggctggagtgcagtggcacgatctcgactcacggcaacgtctgcctccctggttcaagtgattctcctgcctcagcctcccgagtagctgggactacaggcttgtgccaccatacccggctaatttttgtatttttagtagagacgagatttca[132 bp omitted]aaaccttacagcaaagaagccagacggacacccccttaaccaagtgaacaaagttaacattatcataaggagacacagcaataacattcatctcgtgatttgatgctgagacaggcacatcatttctgtggtattcttgccaaaaatgtcttacatcaatctcatcagagaaaacatcagggcttggtgttggttgctcacacctgtaatgccagcatgttgggaagctaaggtgggagaattgcttgagaccaggatttcaagaccagcctgggcaacatagcaagacccatttctaccaaaaaataaatatgtatattagctgggtgcagtggcatgggcctgtagtcccaactactaagcatgctgaggtgggaagatcgcttgagtccaggaggttgaggttgcagtgcagtctagcctaggtgacagagcctagatgacaacctgtctctaaaaagaaaagaaagaaaaaggaaaacatcagactcactcaaattgagggacattctacaaaatcttcaacagtgtcaagctcaggaaacaaaggctaaagggctgtcacagattgtcacacaacacttaaatgcaatgagggatttgaacttggatcctgggccagaaacagtacatttagttgtactatcggcaaaatttgaataaggtctgtagactagttaatagttttgtatcagtgttaattttttgatttcaagaatcagactatgttatatacaacgctaatatttagggaagctgggtcaaaggtctatggggactcttacgtttgcacctttgtttgtaaatccaaaattatttcaaaatacaaacttaaaaaagcaaaacttgaaagttgcaaatcttacaaactttggaaaaacttcccattttgttttcacctgatactaaaacacaaaaagaaaactacaggtgaattcttctctatgatacagatataaaatctgaaatagaataagtgcaagtttggctgggcgcggtggctcatgcctgtaatcctagcactttgggaggccgaggcgggtggattgcctgaggtcaggagttcaagactagcctggccaacatggcgaaaccccatctctactaaaaatacaaaaattagccggatgtagtggcaggcgcctataatctcagctacttggaaggctgaggcaggaaaatcacttgaacccgggggggtggaggttgcagtgacccgagatcgtgccacttcactccagcctgagtgaaagagcaaaactccatctcaaaaataaataaataaataaataaataaataaataaataaataaataaaataatttttaaaagtaaatgcaagttatatccagcctttaattaaaatagcaatatactgtgacaaagtagggtttgttcaaggaatgccaacatcctggatgagcccaaaggaatgcagactggactggtcgcccacaagaatccactgtgaacattgacctggttaaaagtcaggggcctgcacggaggcgtttatgggtgggccctggggtgtgagatggggagtgacctctagtggaaattccagcatgtcaccataggagatgggtagagtctgactgatgcgtccccattgcaaaatttagattggatgtttggggaggagctgaaggagatagggccaacctgcacccacatctctcccaagccagtcccttgctgttgctaccaatgggagtgtgatctctatcccaggtccccctcacaggttgaactttatggagaaaaagcttcaggaagaagcaaaaagaccttttcattaagggccgagaaaccaagtgaaaggggcaagaacatgccatggctctggcccctgtaggcctgtggaaaagcattgctttgaaatcactaagccttgtaccttggggaacacaaggagactgaccccagcacagtcaccactgtaagacagacctggggaaccacagggataactgaggaggctttgaaggaagctggaggacctggagcagggatcagaaattcaaacacccccaagggccaggcaggtcaaactcagcgatagaaggggtgagatggtgttcacttaatatattctgacattccataacagcattgtttatactctgtgccttctgaaataaaccctgttaaaaggtcagtccttttctccccccagtgcaacaaggtcctctttcccaacacagcttttccatagtcttagattttatttctggtagccccttatgtcttattctttcagcagacacattttgcatattaaacatatagcaatattctttacttctacctagaaatatgctttcccccttttctcttagaagcacctggccctcttggcctctttcatttttttctacatttactggacatgattacaaacaatatttcattatttttaaaaattgcacaaatgcaaaaattggcaactgaaccttgactctgatgtgtgggaaacaatagggtatggtgacaatacggtatgatgggatgctaatgaggtaaatgaagagaccactaaaaggagcccctggggctcagctccaacccacggtggccatgtggaaatgcaggattggtgtggctagatcttatgattttaaaagagaaactggaaattggaattcataagagaaatcttctgatttttaaatgttagcaactaattcaaaacagtattctaaaatgtcttacaggccaaactacacatgacctactggctttcagtttgtgacatctgttttctattacacaggtgggagcatgcaccagtgaaacctgagttctttctgttcacatgaggtaatcttcccactggctggaagacacttcatttatacaaacagcgattactgtaaaagtgtattcatgttgttcatcacatgaataggacatgggagaaaaactatataattatcctgagaaaatgccccctaatgcaaattctctgtggttaggaataaaaggagactttgtcaacatgataaatgatatctatctcaatccagcagacaatgtgatagctaatgatgacttggaatgaagggacagatacggtccttaataacagaagaattcctataaaacaagggtgcccacaacttgaatagtttcaacaatattgtgaaattcaaagcaaaaagataagagagtcagaaatttgggaagcaaaagtcaagttcatcattatttgtaagtgatatgattgtctacctgagaaaccttagataagggactgagaaatgtctagaactaataagagagttcaacaaagtagctggagacacaaaaagatgaaattcaataattttctacataccaccaatgaccagatagaaaatgagctcattcatcccagtaaatagtgctgagacaactgaatatccatatgcaaaattgtaaaattgggtccctaggacatagcacatacaaaaattaactcaaaaatgcatcaaagacctaaagctcacagctgaaactataaaactcatagaagaaaacataagtgtaaatcttcatgtccttggattagtaaatagtttcttagatatgacatcaaaagcccaagaaacaaaagaagaaaaataaagtgggtatcatcagtcgggcgcagtggcttacgtctgtaatcccagcactttgggaggctgaggcgggtggatcacgtgaggtcaggagtttgagactagcttggccaacatgtgaaacctcatctctattaaaaatacaaaaattagtcaggtgtagtgacacacgcacgcctgtagtcccaattactcgggaggcta[139 bp omitted]aaaagtaaaattttgttcttcaaggacaccaccaagaaactgaaaagattgcccacaaaatagtagaaaaatactgcaaatcatatatatgataagggatctgaatctagaatatgtaaagaactactataactcaatgataaaaaggcaaatacctaattaaaaaatgagcaaaggatctgaattgacacttctccaaacaaaatatagaaatagccaacaagcatgtgcaaaaatgctcaacatcatcagagaaatgcgagtcaaaaccaccatgaaataccatacactatcaaaaaaaaaaaaaaacagataataacaagtgttgacaaggatgttgggaatttggaactctcatacctatttccttgtgggaatgtaaaatggcacaatcactttggacaatactctgtcaatttcttgaaaaggttaaacatactgttaccatatgacccagcaattctcttaggtatatacccaagataaatgagaacatatgtccacacaaaaacttgtacatgaatgtttatagcagcattattcataacagcccaaaactgaaaaaacacacatgtccttcaactgattaatggataaatacaatgtatatccatgcaatgggatattacttggttgtaaagagaaatgaagtactgatacatacagcaatgtgaatgaaccttaaaaatagtatgctaagtgggccgggtgcggtggctcatgcctgtaatcccagcactttgggaggctgaggcaggtggatcatgaggtcaggagatcaagaccatcctggctaacacggtgaaatcccgtctctactaaaaatacaaaaaattagccgggcgtggtggtgggcgcctgtggtcccagctactcgggaggctgaggcaggagaatggagtgaacccaggaggtggagcttgcagtgagctgagatcgcaccagtgcactccagcctgggcaacagagtgagactccatctcaaaaaaaaaaaaaaaaaactatgctaagtgaaagaagccaattacaaagaaccacatattatatgattttatttatatgaaatgttcaggccaggcgcggtggttcacacctgtaattccagcactttgggagaccgaggtgggtggatcatgaggtcaggagttcgagaccagcctgatcaacgtggtgaaccccatctctactgaaaatacaacaaagaaaattaggcatggtggcgcatgcccgtaatcccagctactcaggaggctgaggcaggagaattgcttgaacctgggaggcagaggttgcagtgagccgagatcacgccactgcactccagcctgggcaacagagcaagactctgtctcaaaaaaaaaaacaaaaaaaaaacaaacaaaaaaaaaagcaaaagcaaaagaaatgttcagagtaggcaataccatagaaacagagagtagattagtgttgccaaagactggggtggtagggagaaaatggggagtgaatgctaatggggatgggatttatgtgggggaaataaaatattcaaaagttgactgtgatgatggttgcatgactaaacatactaaaatccattgaactgtgcactttaaatgggtgaattacagggtatgtgaattatatctcaataacattgttattaaaaatttatcaattgtactatgggacacaaaagaagtcttgcataaatggtaagatatctcatatatctggattggaaaatataatcatattgtaaaagatgtccattttcccccagttgagtttaaaaatgtaatatagtttcaaccaaagccaaataaggcttttaggggggttgggggtaaggaaggagattgacaaaatgattttatatttcatcataaaaaataattgtgtgaatttaaccaagaaactttttcaaaggttgagtgatgagggaggactttccatctgagatatggagatgttctgtaaagccacagagttacagggttgtggtgctgatggaggaagtgtaacagatcaatgggactaaattgatctgtcagaaacaaacacaaatatctgaatgaatttaacatagattaaagaagataggatcaattactcaataatgggttaggacaactgaccattaggggcaactaactaatcattggggaaaaaataagtgtgttttctacttcaaatctttttttttttctttttttttttgagatggagtctcgctctgttgctcaggctgaagtgcaatggcgcgatctcagctcactgcaatggtaaaaaaattttaaaaagttaaatgcaaaaccaaactgaaaaccaagaaaatgaaattcccctaatgagcaaacatacaaaaacaaaacaaaaaaaacaagctaatacacacacatacacatatactacaaaaaaacagaaagaaaggaggaaaaaagaaacagaaaaagtggggcaaatagaaatgaagccaaaagtctgggaactagccaaaatatatcaataatcataatgaaataaagtgacccattaacagtcagagattgttagattgaagaaaacgtacaaaacacaattagttgcgtttctttctttctttctctttttttcccttttcttttttttttttttttttttttttgagatagagtcttactgtcgcccaggctggagtacagtggtgccatctcagctcaccacaacctccgcctctcgggttcaagcggttctcctgcctc[224 bp omitted]acaaaagtgctgaaagccaaaggatggcaaaagaaataccaagcgaaaactaactaaaataaaggtggttagctgtgtcaatttcagattaaaatagacaagtattattagaagtagagatatgatatagtgatacagttttaactcatcaacagataaaacaaatttaaacttatacaaaactaattttaaaaatctaaatattacataaagcaagaattaatagaaccacatggagaaattgagaaattaatcatcattgtgaggttttgacaagcctctgtgaaatattaatgcctcaaaagaggccaggggcagtggctcacacctgtaatctcagcactttgggaggccaaggtgggtggatcacttgtgtccacgagaaaagcctggccaacatggtgaaacctcgtctctactaacaaatacaaaaattagccaggcatggaggtgcatgcctgtaatcccagctactttggaggctgaggcacgagaatcacttgaatccaggaggtagaggtttcagtgagccaagatcaggccactgtactccagcctgggtgacacagtgagaatctgtctcaaaacaaaacaaacaaacaaacaaaagatttcatcaaaaacaattaaactggatttgataatcatatatataaccctacacccaattattgagaaacagtcatattcttctcaagcccagctggaacagttactgaaataaatcacgggcaaggccacaaatcaagtctcaacaaatttcagagaactgatgtcatgcggaccacattctctgaccacagtgccataacaaaaatagttttaaatgataaaactggacacttctaaattgcctctaggtcaaagaaaaataatcacactggaaacattttaaaaatacttagaactgaagctgggcacattggtgcatgcctgtagtcccagctactctggaggctgaggcgggaggattgcttgagcccaggagtttaaggctgtagtgcactatatgttggtacctctgaatagccactgtactccagcctgggcaacatagcaagaccctatccctaaaaataagttaaataaatacttagaactgaatgacgatgaaaatattacatatcaaaactcgtgggacacaagtaaaagccatacatagaaggaaatttgtggcctcttaaatgctaatctgagaaaagaaggctgaaaattaataaactgtctaagaag[203 bp omitted]gaggcaggagaattgcttgaatctgggaggtggaggttgcagtgagcggagattgcaccactgcactccagcctgggtgacagagcaagactgtctcaaaaaagaaaaaaaaaagggcaatagattagtccctacctcctaaaaaaaggagataataaaaataagagccatgattaatgaaataataaatatttgtcagaaccaaatgaagccaaaaaatggttatttgacaacataaacacatatctggcaagatagataagaaatagaaagtacaagtaaataatattagggtcaaaaaagagacataactacagatgcagtagagattatgaaaataacatataatactgtgaataatattaggctcataaattttaaaacttagatgaaatggccatttttttcctggaaaaaaaataacaaaaccagctcattccaattatgtacaaaccctttcagatgactgaagaagaaagaatagtccccaactcattttatgagggcaccataaccttgatatccaaactagataaagatagaagaaataaaaattacaggccgattttatttgtgacgctagatacaaagataggaaaccaaaaatgattatacattatgaccacttgggtttaacccaggaatgcaagggtaatttggcagcagaaaattctatggtgtcattcatcatattaaccgtgtaagagtccgacaggacgcttaaaaggcatttcataaaattatcagtgtttgggggcgggggggaaatctcttagaaaactaagaatagaatttccctaacctgaaatagagtatttagtaaatgcctataataaacacttaattttaacaaagaaatactaggaagaatcctatttattcgtttatttatttattttgagacagtctcgctctgtcccccaggttgggttgcaatggcgagatctcggctcattgcaacctcacctcccaggttcaagcgattctcctgcctcagcttcccgagtagctgggattacaggcacgtgccaccacgcccggctaattttttgcatttttagtagagatggggtttcaccatgttagccaggatggtctccatctcctgacttcgtgatcggcccacctcggcctcccaaagtgtagggattacaggcatgagccaccacgctcggccgaagcatcctttttaatatcaggcataagctacaacatagatgaaccttgtaaactttattctaagtgaaacaagccagttgcaaatcacccctgtattgtgtgattgcatttgtatgaaatgtttggaacagtcaaattcataaagacagaaagtcaactggtggctgcttagggatggttggaaagaaatagttaagtgactgctaatgggcatggggtttgtttttggggtgatgaaaatgctgattggggtgatggttgcacaactctgaatatcctaaaaaccactttaaatgagtgatttgtttgggatgtaacttttttctcaacaaaggtatttttgaaaaagcatgtgaagagcagggtgtttccaagagcagttaattttaaataaacacatatggattcaaaaaaaaaaagatcaggcacaagacaaggatgtgccttgttaccacttctattcaccattatatcagataccccagccagaatattaagataacaacacaatttaaaaacattgtaaaggaagaagaaaaggccattattcaaagagtatatgcttgtctatacagaaaactgaaaagaagacacaaagaaattattaaaaataggccaagcacgatggctcatgcctgaaatcctagcaccttgggaggctg[134 bp omitted]taggcaggagaatcgcttgaacctgggaggtggagattgcagtgagctgagactgcgccattgaactccagcctgggcaacaagagcaaaactccatctagaaggaaaggaaaggaaaggaaaggaaaaaggaaaggaaaggaaaggaaaggaaaggaaaggaaaggaaaggaaaggaaaggaaaggaaagggggagggagagagacagagagagaaagaaagaaagaagaaagaagagtgagcgagcaaaagaaagaaagaaattattagaaataagattggcagttaagataactggctctagaatcactgtacaaaaaaatggattccgttgctgtacaccagcaactaacaaaatacatatttttttaaattacaagataattgttgcaacataagctaggacagtaaacataaaacatttacaagacaatatacagaatactgtaaaacttcactgaaaaacatagaaataattggcaagttatcccattttatggacaaaatgtattataaaaatatcaactctcttcaaactgacctataagattcaatgcaatcctggagaagcacttccaaaacggcagagtggagaccccccaaaattcattcctccataaaagcagtgagaacactggcaaaaaaaataaaaaataaataaaataaaaacctttttagaactctgtaaattaaccaaaaacttgcaacaatctcaggagcatttattcaagaaaaaatgctgactctcagtaagaacagtgagttctgcagcatttttaacttcccctgttctcatctccctctccccagctctgaggtagacttgaaaatcttacaaccatggtagctgtgcaaagcagcaatgttgcagccactggaggaggcaggtggttttggggcacccccaaaggtcccatcccagagaactgtcactatttgactgcgctggcaattccctggaaaagccccattcacagatgtttttatttgacctgactcagagcttgccctactactggagtatttgttgaaagcaatcaacagcaattgtttaacagtgcagctgcctctggcaaaatctgggaaatgagctagggggctttggaaagctctgacatagtcctggagatctagaagagtaggcacatgttcatgcccgtgaaagacctgacaaggccccagtctctcacctcaagctgaccttcggcatgtgctcaagcaggaagtgaaagttaaggcagagatgtaaactaactagggcaatcagagtgtttgtcaacacacacgcacagttccctggcaaagtgcagggagatcaattggtttgggcatttaaagaacctctatttaaacattagctgaccactaagctaaaggagcacagacttccttggccacacaaaacaaataatacagacttcatagaattagtacaggaaagccactaaacaaactaaacagtagcagcaacaacaatatcaacaaacagcagcaacaacaaacgctgggaagggggtgtgaatctgatttccaaatgtaaaatgtcctgttttcaactacaaattatgaggcactcaaagaaacagtatatcccacacacaggaaataaaagtcaatagaaattgtctcagaggaagccagatgttggacatactaaataaagactaaatcagtctttataaacacgttaaaagaaaaacatgtctcatagcaaagtataagaatgaagtctcaccaaatctgatgcgaccaaccccaagaaaaaatcccaacaaagttgtaagtggaatttgctcaggtgtttcagtactgtatatggaagagcaagggactgagaatatacaagatactcctaggaagaagtgtggccaggcacagtggctcacgcctgtagtcccagctactcggaaggctgaggtaggaggttgaggctgcagtgagccaagattgcaccactgaactccagcctgggcaacagagtgagaccctgtctcaaaaaaaaggaagtgggtgggcagaggtggtggtgtggtttttccttatgaaggatcaaaatgcgtcctaaagctatgactgggtggtactggtgcaggtataggcaggtcagtggaaatagatctgcacatatgtggaagtatgatttaagacctagatggcattacaggtcagaggagaaagggggagccctttcaatacatgttgctggcatagttgataattcatatacaaaaataaaatagaatcctttctatcttgtacataacacaaaattagttccatatgaattacactttatcagctaacggaaattttctagtttgatgaatttttattctgaacaagtgttgaattttatccagtgctttttctgcatctattgagatgatcatatgtctttttatcctttgtattgtttcatggtgaatttcattggttgatcttttaatattaaaccaattttccaatcctagaaaatactccactttgtcatatgcattatcttacttgtacactgtgggttgaatttgttaacattttgtttagaactttgcatctatattcatgacagaatttgtcctgttattctctctttctgtaacgtctttgtcaggttctagtatccagttatactagcctcacaaaaagacttagaatgtgtttccagctgggcatagtggctcacacctgtaatcccagcactttgggaggccaaggtgggagtatggtttgagcccaggagttcaagaccagcctggccaacatagcaagagcctatctccattattattattattttttaaagtgtttcctcttcctctatgctattaaagagtttatgtaatattagtactgtttcttccttagatgtttgaaataatttatctgtaacatcatctgggcctagagttttctttgtaggattaaaaatttttttacagctttatcgagatataattgatatacaataaagtgcacatatgtaaacagtgcaatttgagaactttggccatacatatagacccatgaaaatacatctccacaatcaagataatgaacgtcctttactcccagaaggtttcttgtggccctttctagtcccttcctcccatccatccactgcctctaggcaaccactgacctgctttctgttactatagattagttttcattttctagaattttagaattttaaataaatggaatcatatagtatgtactcttctttgtctagatgccttcattcatcttaattgttttgagattcaccatgctgttgaatgtgtcaaaagtccatcctggctgggtgtggcggaccaagcctgtaatcccaacagtttgggagtctgaggcaggaggatggctttagcccaggagttcaagaccaacctaggcaacatagtaagaccttgcctctacaaaaaaaaattaaaaattagctgggtgtggtggtgtgcacctatagtcccagctactcaggaggctgaggcaggaggatcacttgagccagctgaggaggtggaggctgcagtgagccatgatcaccccactgcactccagcctaggcaacagggcgagaccctctccaaaataaaataaaataactccatcctttttattgctaaataatattttgttgtatagatttaccctaatttatctatttacctttgatggacatttagttgttttttttttcagtttttgtctattacaaataaatctgctatgaatattcatatataagtcttggcatgaacacatgctttcatcttcctttggcgaatatctacaagaaaaatggctgattatgtggtagatgtatgtttaacactttaagaaactgccaaactgttttccaagccagttgtattgttttacattcttaccaataggtctgggttccaagtgttccaccttctcactaacatttgctattggtacttaatgtggatttactttgcatttccccagtgactaatggtaccgaacatcttttcatgtgcttatttgccattgtagatactctttggtgaaatgtctgtccaaatatgtttcggatttgagaaagtcagaaaaatctgactttgctgatttttcattcccctattagaaacctctccctatggcaatcctgaccctaactttgtgcttagattcagcaaatgtcctttggaccaaagaggctgttgatcttggctcacctaagcaacattcttcctttttttagttaatctaattttatttgctttcccagatcattgatgcatttaaaaatatgattattgatatggtttggctgtgtccccaccaaaatctcatcttgaattgtagctcccataattctcatgtgttgtgggagggacccagttggagataatgaatcatgggggcaggtctttctcatgctgctcttatgatagtgaataagtctcatgagatctgatggttttataaaggggagtttccctgcacaaattctcttttcttgcctgccactatccatgtaagatgtgactttgctcctcctttgcctcctgccatgattgtgaggcctcctcagccatgtggaactgtgagtccattaaacctctttcctttataaattacccagtctcagttatgtctttattagcagtgtgagaacagactaatacaattattataatttatctagtgtttcaagctgttacaacagaaacttatcactagtttcttgcattctactttaaagcagaagttcctcagatggattaaatacttaaatgtgaaaaacaaaactttaaaacattgaaaagaaaatacagatgaaaaggccgggtgcggtggctcacgctggtaatcccagcactttgggaggctgaggtgggcagatcacctgaggtcaggagttcaagaccagcctgaccaacatggagaaaccttttctctactaaaaatgcaaagttacccgggcatggtggtacatgcctgtaatcccagctacttgggaggctgaggtaggagaatcacttgaactcgggaggcggaggttacagtgagccaagatcatgccattgcactccagcctgggcaacaacaccaacgacaacaaaatgtaaaaacacaaaccccatagggccgggcacggtggctcacgcctgtaatcccagcaccttgggaggccgaggcgggcggatcacgaggtcaggagatcaagaccatcctggctaacacggtgaaaccctgtctctactaaaaatacaaaaaaattagccaggcgtggtggtgggcgcctatagtcccagctactcgggaggctgaggcaggagaatggcgtgaacccgggaggtggagcttgcagtgagccgagatcacgccactgcactccagcctgggcaacagaccaagactccatctcaaaaaaaaaacacacacacacaaaaaaaccacaaaccctaaacttggagaatatgtttccaacacatataactgacatttaacaccccaaatagataagatactcttataaatcaataagttaaagaaaacatctgagtagaaaataggcaaaagacataaacttgcatttcacagaaaaaaaattcatagccaatcaacttataaaaagatgcacaatctcattagtaatctacaagttgaaaccacagaagttcagagagtggcagtctcttggaaaggggtagcattatgatcagggagaagtccatggcaggcttgttgggagagggagtggcattttatttcctggtggtcattccaaattttataattatttattaaaccatacatgcatgctatgtgccctttctaaatgtatttgcagtctaca[136 bp omitted]acacggtgaagccccgtctccactaaaaatacaaaaaattagctgggcatggtggcacgagcctatagttccagctactggggaggctgaggcaggagaatcgcttgaacccaggagactgaagttgcggtgagccaagatttcaccactgcactccagcctgggtgacagagcgagactccatctcaaaaaaaaaaaaaaaaaaaaaaaaaaaagtaggcatcttttttctttatatcaacatacacaatgttatacgcctctttgacctagaaaccattttgtttcctgaaggtgatactgcctagttctagtagactccaccctggctcaccatagtattttaccatttttttcaaaaggcaaactcactgacaacatttgttgcccgttgggagaagtcccgctgcctccccagtgcaccaacatcagcaggatttaggggttctgaataaggatgcctctcaattcaaaccactgggtcaacagataatcagtctaaggtaaaacattgtcgttgtcacccatccccagcccaactttccttggttctgggctgttctgaatcccacaactgcagagcctgccttggtggcagaagaagatttgattaaacctgctccttctgaggcagggtctttcaccatttttaagtcatggacccctttggcagcccagtaaagcccatggacctcatttcaggataatgttttattttttttgttttgttttgtttgctcaggctggagtgcagtggcgggatctcagctcactgcaagctccgcctcccgggttcaggccattctcctgcctcagcctcccgagtagctgggactacaggcgcccgccaccacccccggctaattttttgtatttttagtagagacagggtttca[145 bp omitted]aggaaaccaattataccgtaacaattatattacagctttaacataaataaatcaaattggaaatctagtaataaatgtgcttctttattaatgcattaaataacacgatctcgtggcggaactaataactggcataatttccaaatagcgacagatgcaaatgacattttgagttacctccaactgctgtaatgtgatgtaaaaaatacctgtaaatttattggtgacaaaatcacaagtactgtttgttgacactactgtgatgtgttgcctacattgattattcatggaaatgctaaatttcagttgaagatgagtgaaaaattagatgcatatctttttcctctcaaagttcagggactccgggttaagaaccctgaggtgtaaatggacaccgactgccactagggggtgctggtattttaggaagaggcgtttgctcctccagaggagagagggtgaactccttgagtctctttgcccttttctctggcgggcttcagaactcacagccctggaacatctcctcctggcctcccagccacctccaaaccctcacaagcacatcctgttgacagtggaggtgcaactcttggtgtgaccatctataactcatgcagaggcctcctcagtgaatcctctgaccaccagcactcagaggggtgtacggcccagtgggtaccactcacagcacctgagcctaggtccttgcagtaaccacagtcctgactctaggccatcggggccagcaagaacccacaagacactgcaggctctggttctgagcagactcctcaggccctgcccggcttccttctgtggttggtgggcagccaggcaggtcctgatgaaacctgaggagggccaccagcctttctcccctccataattgggggcccagcagaattggataatggtctgcaagttacctgaatcttgggctgagacaccgtggtagtcagagctgccgagcgttcacagatgtcttgcctgattcctctcaggatgagagtggaaataactttctttctgggcagagtttgatgatattgctacatcatcctctgtaggcaaaacagcaagagtctgctattcccaccttgtgcttgcactggtaggagagccagctttgaaaccactcgaggggcagtgtgacagagtgacaaaggagactccagacaacttgaatcagaaaacccacccctgaggccgggcgtggtggctcacacctgtaatcccagcactttgggaggtccagtggggtggattgcgtgaggccaggagtttgagaccagcctggccaacatggtgaaaccccatctctactaaaaatacaaaaatttgccaggcatggtggcgcatgcttgtaatctcagctactggggaggctgaggcaggagaattgcttgaacccagaaggtggaggttgcagtgagctccagcctgggtgacagagtgagactccgtctcaaaaaaaaaaggaaaggaaaggaggaagaaaaaagaaagaaagaaagaaaagaaaagaaagaaagaagaaagaaagagaaagaaagaatgaaagaaagaaagaatgaaagaaagaaagaaagaaagaaagaaagaaagaaagaaagagaaacaaaagaaagaaaagagaaagacagacagacccgaccaggcacagtggctcacacctgtaatcctggcactttgggagaccttgatcacgaggtcaggagattgagaccatcccagccaacatgttgaaatcccatccctactaaaaaaagtacaaaaattaactaggcgtggtggcatgagctggtagtcccagctactcgggaggctgaggcaggagaattgcttgaacccaggagacggaggttgcagtgagcagagatcatgccactgcactccagcctgggtgacagagcaagactctgtctcaaagaaaagaaaacccaaccctgccacttacttaggttccgtttaactttaggtgagtcatttagaatccatgcctcagtttcctcgtctcccaagtggagataatagccctgaccttatagggttgttatttgggttaaatgacatgctacacagaaagcacctagaagagtacccggcccatagtaagtaccaagtaagattttgctattattaataattggtatgaaattgataaaatgaataaaattctttctctccttgcctccacttacccaaacaccaactccactttctttctcccatcatgactctgtttgctcctacaaatcagattctttttccctttttaaagaaagagtctgatttcccagccttggcaacatagcaagacctcattgctacaaaaaaaaaaaaaaaaaaagccaggtgtggtggcacacacatttagcccagctacttggaaggctgaggtgggaggatggcctgagtccaggaaggggaggacgcagagagctgtgattgagccactgtattccagcctgagtgatagagtgaaaccctgtctcaaaaaacaaggtttattccttttcaccccaaacttgtccctgtccctccctcatgaccttcctgggaagcatagtaaaacatgcatcagggcaagagcctggagacctggggtttaattccacttctgggcttcccctccctgagcctcagctaaacatccaaggatccctttgttttaaaatataggttgtgttggctgggtgcagcagctcatgcctgtaatcccagcactttgggaggctgaggtgggtggatcacctgaggtcaggagtttgagaccagcttggccaacatgatgaaaccccgtttccactaaaaatacaaaaaaattagccacgtgtggtggtgggtgcctgtaaccccagccattcggaaggctgaggcaggagaattgcttgaacccaggaggtggaggttgcagtgagccgagatcttgctattgcactccagcctcagcaataagaccaagactctgtctcaaaaaaaaaaaaaaaaaatgtaggttgtcttattattcaggtaatgccgaggacagcagatcaggagacaactaccattgaaaaaagagtttgctactcacagttccggagtggaagggacatgccatgccacacagggccacacgggggagcccagggttgggcaagaggcagaaggaacaagaggaaatcagggcaggggccttaactatggtttcggagggaaaggcaggcaaggcaaggtttaggattggcaagtgtgagtaattttggcgggctccaaggtataggggatttctctagttgtctgacacttggccctggggtgactaggacaagtcgtgagagtttgggtgtgggctctggattggttggtttgcatatcaaaggtgtgctcacagcgtagtctttgccatctctagggattaactaaccctggaagggacagtccctccaggatcagcaaaccccagaccccaaagcatcaagaatacagaaaacaagaagacgtagttaatatacccttctactatgaatgtggtttcatcagccactttatacatgtccaacaatacatattgctgctatgacatcatgactttttatcttcacaggggattctgacataggggttaaggataccgtctctggagtcagactacctggatccaatggtaacctctctgtgcctcaatttgtagctccctcattttatagctgtgggatttgggggcaattacttaacctctctgtgcctcagtttcctcatttgtaaaatgaggatgctagttccttatttcttagcacggtggccattagaaaaactatacttgtaaagaaagctcttagaacaggctgggcatatagggagcaatcaatacctgacaactattgtgatttcttgatcatgtcaagctgccttccagattagagttttcacctctgctgttccccgcgctgggaaggctctttcccactctcttcacctgggtaacaccttctcttccctcatgtttcaacttaaatgtcacttcctcagcgatgcccccacgtcccaggcccctagcctacccagcctttgttatactctgtcacatggcccctgcacttccttgtaatgctcatcatagttgcaattgcacagctgtttgtgttacagtttattgaacatctgcctgcctttccctgtagaccgtaaaccttaggagagcagggactgtgtctgtctggttcctgctgtgtccatagtgcctggcataccaaaggtggtcaataaatgtctgtgcactggataaaccacataggtttacagctgcaggtgcatggatgcctgggtcagaggccatctggactcttgtctaatggcagaaatccaaagtcacaggcttctgacccctttgtttgatgatgggcttctgatgaagggcttctgggcccttcagctgcccttttcaggccagggagtctgggagggaattcttgaggatcaaaatccatgttgtagatgaccagctggcctggagacatcaattggcagaagtgatggaatgtgtacggaaagatgcagctgccctgctcaggagggacttcatccttgctttgctaaaccagctgaattccaggaataccagcgaggggattgggtcatgtcatacctgcctctcgagacaagcaagccgaaagctgaagggggcagggaggtgctagaactgcagagagaaaggaagggccagatgtacggaccggaaaaagccctgtagcaggtggaggtgaatataattaatggagcccagtgagcaagtctgcacatgccaacgtcaaaacctcatcccaaggagccatggtctcactaaccccatccctgagagggcagagcaagaatagtttgagattgacatgccaagcaaatgtatagcaggaaattctcctaagccaggggtttggtcagaggccctggcccctgtggctaaaatcaggattatgtctgtactgatttacttcccagctgggtttcaggaaaagcctcaaaaagaccacagggttgtgcctcagattggcacatgaggccagcttcccttgggtctgtgctttctggacaaaaagctaatacgaagggagatactcagaggaaaaggccccatcccacagcctccctctctctatagccccctttgagtcttggcaagtgtatttgtgacagctagaacaaatcaaatgtattttacaagtttagcctcaagcagaccaagtgccagctttggtagacatgtccaaagggattttgaccctggactagtggttctcaatggagatgctattgttcatttagagatttggggggtcgtggctttggctgtcatagtgattggcagtcactactaccatttagttgtcagggaccagaggtactatatgtcgtcaatgcatgtaagcaaccattgtgcacaggaaagggttgtcagccttcccctacaacttttagataccccactggatattcatgtagataaaatataatctgtgctcagagcctacctttattttgtttatgtacacaaaggtttggtttggttaggttttcacaattttaacatacactgcagtttccaggaaggcaactttaccaagtgctgttgcctactttggaaaatcacgttacctggggcaatgccactctaggtgctctaggtgttggaattaccagagcaacacatctctatcagacctcatttgttactatggtgttcttggtaatgctacacctaggtgcaagcagctgactacttcaatatgtcatctaacatagttgtgcccaagcatttacatattggaatgtgtgttattttattttatttatttatttttgagacggagcctcactctatcacccaggctggagtgcagtggcacaatctcggctcactgcaacctctgcctcccttgttcaagtgattctcctgcctcagcctcttgagtagctaggactataggtgtgtgccaccacatccggctaattttttgtatttttagtagggacagggtttcaccatgttgtccaggctgatctcgaactcctgacctcaagcaatccacctgcctcggcctcccaaaaatgacgggattacaggtgtgagccactgtgcccagcccatgttattttattatacttggcttcttcttcttcatattgtgttgatatagtggaggaaattatggatgttggaaggcaatatgataaaggggtgtgttatatattttattgtttttaattatttatttttttgagatggagtctcgccctgtcgtccaggctggagtgcagtggcgcaatcttggctcactgcaacctctgtctcccgggttcaggcgattctcctgcctcagcccccaagtagctgggattacaggtgcccgccaccacgcctggctaatttttgtatttttagtagagttggggtttcaccaagttggccaggctgttctcaaactcctgacctgaagtgatctgcctgcctcggcctcccaaagtgctgagattacaggcgtgagccaccgcgcccagccaagggtgtgttatagaatatttgttacaaaaaaagaggatgatgctgtggaaaaactcagacaggtgcatcactgccttggttggatggcagtacatgagtccacatggagctaacgctttacccaaaccatgccctttatttgtagacatccactattttctctaaatagaagaaaactttttttagtgagtggagctgattagaaaaaatttgttccattatagttgatatcgttatatataactcacagatggacccacatcactagcaaactatttgtatcgtttctccaagcccagcatttactgtgcgagccacctgggggccatttttgttgcccgaggtggtgcgcctgcgccacctggtggactacgggaaagtagcagatcggtgagatgggttgaggcaccttcatttgcagatgggtaggcaataataacatgaatattatcagctaatgcacttatagggtgcctataagtgcattaactcctgcagaactcacaaaatctttatgacatatagtcactgttatctcctttttgcccatgaggaaaccgaggcaagtagtgagtagagaggcagagctgggatttgaagcctagtggactggctccacagttgctgcttttaatcaccctgctataagctgggcatggtggcacacagctgtagtcccagctactttggaggctgaggtgggaggatcacttgggccctgagatggaagttgcagtgagctgagattgcagcactgcactccagcctggataacagagtgagaccctgtctcaaaaaataataatacaattaaaaaattaatcagtctgctatggacttgcaagtagctgctctcttgggagacactattctgagagtcaaaggctgtactgtgaacatagggctgccttcagccatctctttcagggcagtagggttacaaagacagagagaaaggatggtgtgctcagtggctcacacctgtaattccagcactttgggaggccaaggtgggcggatcacctgaggtcgggagttcgagaccaacctgaccaacatggagaaaccctgtctctactaaaaatacaaaattagctgggcgtggtggcgcatgcctgtaatcctagctactcgggaggctgaggcagatgaatcgcttgaacccaggaggcagagatttcagtgagccaagattgctccattgcactccagcctgggcaacaagagcgaaactccatctcaaaaaaaaaaaagaagaagaggaggactagaaagagagtacctagtattaggacatggtaagatctagaagagtcttgccattgtatggaccatggcaatctttgtgcctactgtgtgaggagggtgtttcattcttttggcaatgaagggctctagaatggctgaatccctaattatgttgcaagcttcgtgaaggaaaagtacacattccctgttcacttctgtgtcaccagtatttaccccaggacctgacaggtattgaatgttcaataagtatttttatttatataacatctgtgttgagatattcatataccataaaattcatccatttaaaatttacaattcaattgtttttaatatattcacagagttctgcaaccatcactgtaatcaattttatcacccctaaaggaaaccaggttactattagaattcattccccgttacccccaactcctatctctagccctggcaaccacaaatctactttgtgtctttatggatttgcctattttggacatttcattataactggaaccatacaatttttttttgttgttgttgttgtttgtttgtatgtttttttgagatggagtctcgctgtgtcgccaggctgcagtgcaatggcgtgatctcggctcactgcaacctccgcctcccaggttgaagagattctcctgccccagcctcctgagtagctgggactacaggcgcgcaccaccgtgcccagctaatctttgtattttttagtagaggtggggttt[132 bp omitted]acttagcataatgttttcaaggttcatccactttgcagcatgtatcaattctttattcttcttaatggctgaataatattccatcgtatggatatattgcattatatttatccaatcattagttgatggacatttgggttgtttccagtttacggctattgtgaataattctgttatgaacatttgtgtataagtttttgtgtggacatgtgttttcatttcttttggatgtattcctagcattgcagttgctgggtcatatgtaaatatgtaactttacatttaacctttgaggaactgccagagtatttccaatggctgcaccagtctacattcttaccaacgaggtataagggttccaatttctctatatcctcgccaacacttgttattatctgtcttttttattacagccatcctaatcattgtgaattggtttttcattgtggcagggctgttgctttttaatcataggcaaataaacacccagcctattgaagctggatggtaccacaacaaccatgtggtccaatttgttcattttataggagaagcaacgaacgtgttaagagaataagaaactatctcaaggtcacacttagtaaaggaggcagtaacagaacctatagatttttttttcttttaagaaagaaaggaaattaaagccagatggcataaaaagagagatagagaaagagagtcttctataaaacctaggagaaatttctttaaccataaaaccagaagatgctgggtgcagcagctcatgcctgtaatcccaacattttggtaggctgaggcaggaggaccacttgagtccaggagtttgagaccgcctgggcaacaaagaaagaatcaaggctgggtgcggtg[131 bp omitted]tagctgggcatggtggcaggcgcctgtagtcccacctacttgggaggctgaggccgaagaatggcgtgaatccaggaaggggagcttgcagtgagccaagatagcgccactgcactctagcctgggcaacagagcgagactccatcaaaaaagaaaagaaagaatcaaaaagattttttgattctacaaaaaaattgaaaaattagccaggcatgacagtggtcccagctacacaggaggcgacggttctctatttattccttcagtcattttaatggttattgggggaggtgtgtcagtggaccatcttggaccaaggtttggatcccttgggcccaagagttcaaggcttcagtgaactgcgatcgcaccactgagctccagcctggggacagagcaaggccctgtcaaaaaaaaaaaaaaaaaaaaaaaagcacaagacagacaatgaatcaataactaataaaggatagtcataaatagttagtcatggatcctctactacgtcttaggtgcagaacacggtaagtgctttacatttgcttccctgtttaatgctagcaacatgcctattttagagagttgaagtgtaaataaaggattatgaccctagactcttatatctaactactgtctgtgtataaagtaacagacaatctgagacatgcgaagactcaaaaaatccaccgtccatccacccttcccccaaggtttactcaaagtagcatttcagtggtgtgagaaattaatcaaagtaaggaactcaggaatgaggaagtcatttacgtaaatgaaatgacaataaacaatgtaggcagaaaaactgagttagaaggctgggtgcagtggcttacacctgtattcccaacactttgagaggccaagatggaaggatcacttgaggccagaagttccaaaccagcctgggcaactcattgagaccttgtctctacaaaataaaaagtgttttaaaaattagccgggcgtggtggcatgcacctgtggtttcagctactcgggagactgagatgggaggatctcttgagcctgggaggtcaaggctgcagtgagccatgatcccgccactgtactgcactccagccaggatgactgagcagggcccggcgcccccaccgccccccgcccccacacacacctgcgccaccaccgccccccacccccacacacacccactaccaaaaaaaagagaaaaactgagttaattatgaacgtagtttgaaatcacaatgccaatgtcaaaaaatgattcttcaaagagcaagcatatgatgtaaaattttaataatggcctgaagctaggatcctagtttatgccggcaaacctgtgtcctccagcagccttaagctcggcagagattcccaggcgccggcctcgcgggtgaactgtcacacgtacccagagcttggaggaggcgcgccgggggagtgttgtgctggggattcccaggccggctcctgcttctcgcctgatgaatgtggagttccttcagccatccctcggatcctcttaaacttttctaagtttcaggagtgtgaatgacgcattcccctagtgttaagtggcgacagttctccctctattttatctcttcagtcattttaatggtcattgggggaggcgtgtcagcagaccatcttggatgaagggcaaaaagaccagttagcatggaattgaggtttgtcgctggtgatggcagtggggacatgatcgcacgtccttgggtcagacttctcagctctctcctccccatttttacccccagcactcggtcaaacaaacagacaaacaaaaagacccctgcaactcccagacaaaccaaagctagagtgtgtaggttgggtggctttctgttggatagttgtgtgtcccaagttacacgcatcctatcttggcccagctccactggagcccgagcggcggggcgcagggtgcgagcgggaggctggtgttctgcccgcgatgggcaggggagccgggtggccgcggggcgaggagccgcgagggccgggccggcgtgacaccacctggcggagtctcggggaagagtcttaaaggcgcgcgctcctccgtgccccgcgcactcgaacgggagccgcggagagctcgcctcccgctgccgccggcgcctcggggaggtaagtgccacccgcggatcccgagtcgcggccgggtgggggcggcccgcggctgccccgcgctcgggaagctctggctggggctgcggtcggagggcggcgcccaagttttcttgaaggcctcggagggcagctggagcggcgtagagcctgcgcggggatggcgggggtggccgcgggccggggccgtctgggggcggccatcccgggcggtgcgtggaaaagtaggcactggtgcgcggcgaggggcgcacgccagagccccagccccgcgtcctgcgcacttggcgcgctctggccgcggtcccggcgagccccagcctgctccgggccgcgaccccggctccgcgccttcctgcccgcccgggtcctttgtagcccgctggccccgcggtcgcgcacggtcacgccggcaggtcgcgctcggcggccggccaagccagccccggccctgccgcgcccgcgccccgggccaccccgcccggccccctcggcgctgcacccctcgctttccccatctccagccgctcgctattttcacacctcccggtgccccggccccggcgcctgattcagtgcttagtaattaatttggcgtttcagaatggtcagcgggctggataatgggtgcattcatcccccgggctaatctgaacagaggtgggaagaaaggctttcacagacagaaaatgccattcgccgagcgctcaaaggggctgtcactcccagaataaatcgccgccgcgcccgccggctcctctggccatttccatacagctccggcccgcgccgcggacccgccggcctcggcctcggctcccgggaatcactcactcgagtgccttcgacgggaaagtcgggcgagagctggacccaggcgggggccgagggaaacggggaaactggagactcgggtgaaggccgcaggggacaaagagattgattagaaaatcaaacgcgcatctagaaggaggcgcaggcgactgctcaaggcgcggacggcggagctggggctcgggagcgtccgtccaaaacccccgaggttcgccaaagaggagggcccgcggcccagaccctccggagcgtgcccgaggcgacacggcaagcttctggggctcccaaattgtgaatggagttcaatgcacaagcatagatagtagaaacagggtcgacctgcacagactttttattccgagttccttgtgctatcagccccgtcgccctcgcggcctggaaggtgacacggtgtcttccccggcctcctgctcgccacccctgttgggaccctcgggtccgcctggggacatctgctgagcgggtgacggaggctttatcctttgatcccttctggatccggtgacgcgctaagtgttgggcacgtacggcctacggagtttgaatgctggggccttcctgttgcggcacccccagcccactggtgcagcgggatcgtgcgctcccgccgcagccctaatccagaggaccgcgccgcgccagcgccttcagccaggctgtggcgcctccagtgggtagggctggctcggctctagccaggtgaagctccagactctggattttcccgtcttcggggttcagcgtgtatccacctcacccggccgacttggccctgggccctttcacccagtggaatcctgccactgggagaagagaaagagctgtggctctatggcgaaatcttagctcggttgagaggcagaactgacacagctgggacgaaggggagtttctggaatggccagatgcgtgtcccaggtgtgtaggggagatggaatctccgtactactcatcaacttctgagtggaagtcatccctcccctctgtgtctgtttcctcatttgcaaaacaaggataaaatgagatcacatgtggccccaagtaagggggctctcagtagaaggatcccaggcaccgctcccaccactgaccaccaaccttgctgcacctcccccgcatctctccacgtcttcaccaacattctcctgggagctttagcgactcccagattttctctcaggctgcctccacccaccccttgtggctttcgggttctgatatccagctgtccttgaaatcacgctttctaagagttggaaacatccttccacagattctagagccattatacagatagtgatattgaggcctaaagtgacttgcagttgtcacccagctaattagagggcttgagccagaatggatttcatggcaaacagtgaatctcggactctgggcatcagacttccaaccgcccccaccccgacccaacacacacacacatacacacacaccctccctcctcctccccaccgctgccccacagcttccctacgtctggggaggggcccagaaggctgcattttaaacaagcatcctgaagcatgttgatgcaggtggtataaggaccatatttaggggaatgcagcccaaatcaggttctttacctagcaggcccttctctcccaggaccatgggctttgcttgttctatgtgcgtcacatatgatctgcagaacagtcttttcggtgtcctcccagactggaggccatagtgggtgaggtctatttctaggagatgctccagtatcctccagaatgtgcagccaatgagggagcggcagggggtgaactgtgcacccagccagatgaggagaggccagagtgcaccgcaggctgcctggatgttgagtccccaaacccaggggccttctcttaccaatgtgctttcacagctggacctaacactgcacactgcaggccccacacagacagtacaaatgtgcccagaggccccccttggcaaggcaaatctgcccacgccagggacagagcagccggccatagggggacccatgccagcaataacccaggtgtgagctgtggcccagaatgccagcacctgccccttcagcatgctggggtttggaggtgtgaagtgggcggtggaggggcaaagagaaggcctggaaaagtggaagaaagtgggtagggggaggagaagccatcaggtacgggggtggtgggtagtgggggggacaagtccctatttatgtaagccatttgtagctgcgaattgtaaaactgggcaggcttctctggagtaattcatagtgtttggacaagacaaacattgttctgctttaaacaaacctccagaaaggtcagcttggttcatccctttgctgcgagtcgctgagactatccagatgatgagaaaatcagatcttcgctgagggggcccaggcaggaggtggtggactcctgagccctttggatgctgagcgaggacacccagtgcagggaggggccttggctctgttgaaaaggctggactcccaatccggagccaggagatgtgaggtgtgtgtgtgcacatcacagattgtgagattttgatgatggcaaggacatcatccacattctagggccaagccaacatgacgtgcaacatgaatcttctttatgtggaagaagaattgatgggaaatgaaggttcatggatgcagaaccaaattaacccaactaatgctatgcccagatatggccctggacaccaagaaatccatgttccttgcatatggatgccctggtagggcccttctgtgttcatttagcaaacatttttgagtgatcacaatgtgtcaagttttgtgctgggtactcagggttacagtagggaacaagaaagatatattagtagcacccactcttggggcctatagttctgggttatcctctccttccctgtcttccctaagaagagaagctgttcacaatttcacttccagcttctccaccgccatcatggcctcaccaagccccctggccaagacccagcataccagctccctccacggggcctgacagtaagtgctcaagaaatgctagccgccatggttataattacgagtacaattgtgattacgagactccattgttttcttttcttttcttttttctctctctttctttctttctcttttttctttcttcctttcctttctttccttccttctctctcttccctttctttcttccttcctttttcttcctttctttctctctgtttcttttctttctttccttccttccttctctttctctctttcttttctttcatcccttccttccttctttctttctttcccttcttttcctttctttcttccttttttctttctttctctttctctctctcttttctttctttccttccttccttgtctttctctctttctctcttcttttcttctctctttctttttctttcttcccttccttcctttcttcccttccttccttctctttctttcattcattcattctttctttctctttatctttctttcttttttctttcttccttccctccctcccttccttccttcctttcttttcttttatttcttttctttcttccttccctcccttcctaccttccttccttccttctccttccttccttcctttctttcttttctttcttccttccctcccttccttccttccctccttctcctttcttccttccttcctttcttcctttcttccctcctttctttctttcttgcttgcttgcttgcttttagagatggggtctccttctgtcacccaggctggagtacagtggcatgatcatgcctcattgtaacctccaactcctgggctcaagctatcctcccacctcagccttccaagtagcagggaccacaggtgcaagccacaatgcctgcaaataatttattattattcttattatttttgtagagataggattttgctgtgttgtccaggctggtctcaaactcctggcctcaagtgtcctcccacctcggctccccaaagtactggaatggcaggtgtgagccaatgcacttgacttagactctgttcttgagtgatctatctgaccctgagctgaagtggatactttgtattgatatttactattcattctcattgtcttattattaatggcttattaacaatacattattgatgctcattaacactaaagcccagtgtctctgtggtgccagtcatcactgtcctgtacatgatctctgtttgccctgtagtaagcttggtgatggcagtatcactggatttgctggttctaggcaactttttaatttaagttaattaattaattagtttatttatttatttatttttgagatggagtcccactctgtcccccaggctggagtgcagtggtgcgatttcagctcactgcaacctcggcctcctgggttcaagtgattctcctgcctcagcctcccccagtagctggggttacaggcatgtgtcaccacgcccagctgatattttttgtattttcagtagagacagggtttcaccgtgttggccaggctggtctcgaactcctgacctcaaatgattggcccacctcagcctcccaaagtgctgggattacaggcatgagccactgtgcacccagcagtctatgcaactttatgaaaattgtttagggctttggacactttagggtcttctgcatatggttttttactcaatactcctgatatccatggaaggaagagagggcgggagaacaaggaaggaagattactatccacatttttcagaagaggaagttgatacttacagaggtgaagtgatttgcccagcatcacggagatgttaacggaggggactatgtctgactagggtacaatccaaaccccagctctactaaaaatacaaaaattagctgggcatggtggtggatgcctgtagtcccagctacctgggaggctgaggcaggagaatcacttgaacccaggaggcggaggttgcagtgagctgagatcgcaccattgcactccagccagggtgacagagtaagactccatctcaaaacaagacaaaacaaaaacaaaacaaaacaaaaaaagctctgtcttgggacttttgcacatgccattccctctgcctgaatgtacacttcccccaaataacatctgtccccagagcttccttcctcacttcactcattctgctctactgggtccttcttagggagtccttccccaagtacctgcttgaaatccaaacagtcctcttgggcctgcatcaccctgctgaccacccatggagctccctgcaagcagacctggaaaccagcgctctctgggcgaccccataaagcaggtgcttggccagaggctaggaagtggctccctgggcgaggtcatgtccttcccaccttctgcgtagtttctggcattattctgggggctggcatggtgatgctcctgcctgatatcagcatccacaggtgagggggacattccttccttccccaccaaatcttagtttcctttgccatcttattatggttgaataatccatgcacttaaccattctgtttggaatcaatgatccatgtctgttttcatccttggagttaaatcctctaaattttctttctgtgtgatatataaaccagcaatacctcattttactgacatttgggggaaataagctgttctacataattggtttttgcagttaacagtagcttactccttgaagcatagaaactttttatggaatcatatttcatgaaaaacatttttccatcaaaatcatgacttttttcccccgcctaagttagcggaattgaatacagcaggtgttccctaggtgtggctgaatgagtggcccccaacccgttttgatgactcacagccatctctggaaacagcagctcctgggcaatttgctcaacctccctgacgtcagtttcctcactcgtaatctggggaactttggatgagatactctctaagggccgcctctgtccttctctaactctgctgggctctcatacagtaaagcccttgggaatttttggtggttgcaggaccagtcttgcctccctgaatggtggctgggataggattctactgtcagctgtcacttctcagtgcatccatgttcagcagtcaccatgtccccaaggatcttaagctgtggctctccagtcccctggaagaacagaagatgtctgacctaaggttataaagtcttgtaaatgaagaactcctggggtccctgcagactgaagtcccctgtgtcttggctactgttctctcaaatgcccaggaggctattcacttacttctggactgtgatctgggttgtaacgggtgctgcaaccgtggcctctagagaagaggtttacaataccttaatacaaacagcaagcacttggcaagcttctgttgactgctctgaactcagtgttgtggggagggaaggagcagtgagatgtggtcacttcccgtaagaagaaaacccaaaggaagacttcatgaatgttttaagaccagcgtgttagtggtctctcattttgttcctttcatttgccccaagcatgtcttttaagatttgaagaagactcttaattctggcatttctgagatttgctgggatattagtttcctgcggctgctgtaacaaattcccacaaatggttgcttaaaacaacagaaatttattctctcacagttctggaggccagaagtctgaaattggtatcaatgggttgcaattaagggctgtagggcagcggtcctcaacctttttgggaccaaggaccagttttgtggaagacagtttttccatgggcgtgggggtaggggatagttttgggatgatccaagcgcattacatttattgtgcactttatttctattattattacatggtaatgtgtaatgagataattatacaattcaccatcatgtagaatcagtgtgaggcttcagcttgtttttttgcaactagatggtcctatctgggggtgatgggagacagtgacagatcatcaagacttagggccttataaggaatgtgcagcctagatccttctcatgtgcagttctcaacagcattcttgcttctgtgagaatctaacgcagctgaagatctgacaggaggcagagctcaggtggtaatgcgagcgatggggagtggttgtaaatacagacgaagcttagctgccttgcccttgctcaagctgctcatgtcctgctgtgtggcctcgttcctaacaggccacagactagtggtagttcctggtctgggggttagggacccccgctgtagggaaggatcctttccttgcccttcagcttctcatggctgctggtatcccttggcttgtggctgcatggctccaatctctgcctctgtctcacgcagctttatcctcttctgtcttgtcagatttccctctgcctgtctcttgtaaggataactatgattacatttagagtccatcccgatatgccataacaatttctccatctcaagacccttaatcacgtcagcaaagacccttttacacccatataaggtaacattcactggttccagggattacagatatggatatcttttgggggggcattttttttgagacggagcctggctctgtagccaggctggagtgcagtggcacgatctcagttcactgcaacctctgcctcccaggttcaagtgattctcctgcctcagcctcctgagtagttgcgaatacaggtgcgcaccaccatgcccagctaatttttgtatttttggtagagatggggtttcaccatgttggccaggatggtctcgatctcttgacctcgtgatccacccacctcggccccccagagtgctgagattacaggtgtgagacactgcgcctggccctggggggcttttttagctcaccgcacagagctggtcaccactttaactgtccataattctgtggtctttagtcaattaatttgtagtgcactcctattttgtgccaggcagtctgttaaaccctggggattctgagggaaaagaatagttccttcctcagacgctatgaaaatcagagctatgtggaaaagaaggaatctgggccttaaaggtatctaagatggatcttgatgagctcaaattccccatcaaagtctgcaaggccctgcttggtctagctctcagcctcccctctgagctcatcc[138 bp omitted]taaaacccatctctactaaaagtacaaaaattagctgggcgtggtggcggatgcctgtagtcccagctacttgggaggctgaggcaggagaatcacttgaacccgggaggcggaggttgcagtgagctgagatcgcaccactgcactccagccagggtgacagagtaagactccatctcaaaacaaaacaaaacaaaaacaaaacaaaaaaaaaaaaacaagctctgtcttgggacttttgcacgtgccgttccctctgcctgaatgtacccttcccccaaataacatctgtccccagagcttccttcctcacttcactcattctgctctactggatccttcttagggagtccttccccaagtacctgcttaaaatccacctcccctcctggcacgtcctgttccctcccctgctttgtttgtgcttctgatgtaccacagtggagttgctattgtctgggtcagctcagccaccacaaggatgttgagatgtgataactagaagttgtcagaagatcctaaacgcatcctgtttcatttccaattctcttcctgagaatgtagtttgctttttattttcttttacttttcttagtagcacattgggcttaatttcaagtaaatcagaatgggggtgggatggctctttaaagggggatgtatacattctaggagccattttttggttgtcataatgactggtgtatggtgtgtgtgttgtgtgtgtcaggggtgggtggaacttgctggcatttagtggacaggggtcagggatgctaagtgtcctgtggtagccaggtctgttctgcccagggaagaatcttcctaccacaatgccaataccacctctacagagaaacactctttttttcttttttctttttctttttttttttttttttgagacagagtttcactcttgtcacccaggctggagtgcaatggtgcaatctcggctcactgcaacctccgcctcccaggttcaagcgattctcctgcctcagcctcccaagtagctaggattacaggcatgcgccaccacacccggcttattttgtatttttagtagagatatggtttct[131 bp omitted]aacctttcattctctaagagtattttaaatgatgtctcccagatccatcacctgctaacctgttccctggcccattcacacaaggtcttgagattctccagttcatcctcttgctgttgccatcagtccagtgtcatctctaaaccttgaggtttcacgaggggattccctccttcagagtctgtgtaaccggtaaacaagctgagccccaactctggctcagaggccccccactattttctccatctggagcaacatccttttctttgcaccctttgttccttcctcaaggcctgtcttccatccatgacaaagcctccctacacagtgacccattttctttattttaatagcatttggggtggaaccttgtcaaaagctttttgcaaatgaaaataaattacatctgctggttcccccatccacaggcattttcaccccttcaaagagccctggtagattaaaggatttggaggatttggggtttgtatgggcttctatgcccagctcctgagttctcagccaagacacctgcaaagggggaggcctgagctgaagatacagataaacgacgttggggaaatggatatctccaggaacgcttcccactagattggcctgctccccatgttctaaagccttttccaggacagtcacatctcctgaaatcctgtccagggacctgggattccctgagtaatcctccatgcagcctatcaggtgagctgggctctagatgccttgaaatgaaagactgtccctcgtacttctagggtaagagatctggtaggcagacctgagaattatacatatgaaaaaaagcaaaaacaaaacaactcaaaacctactatacattgaacatccatctactctctgccagggtctttcctttcagatccaagttttaaaatcgccgaccaaccctataaaggtgaatgcagtgaccccatttcaccatgaaaaaaatggatgctcagatgggcaagcaacttgcccagagtcacaccattaggaagtggcacactggaaccaaggcctgtccaagtcaagttctttcaatctgggaaggaaacactatgaatccaggccactgctcaccctcctggagaggccaaatcctcctggtcacctctgcctgctgcaattcccaggctgtactactgggagtactgggaactgagtcatctagggtctgtcctcttaactggaccagaggtgttaagaagcacagtccatccagaccacacagctcatactcttggtagaccagaagcccatccttcctctcagggatgattgagacccagtcaagcccatcttacccacaggttctgactaagagctccaaactctggacctagattattttagttcacacactgcttctctacctaccagtgatgtgatcttcagcaaattatttctctgtgtctcagtttcctcctccagtaaaatggacacaataatatacctatcttacatggtgtttatgaagattgtgaactaaggaatatcaaagtgcttagtagatgcttggcacacagtaaatgttacacataatgcttgatttaaaaaggaaaactcagccaggcacggtggctcatgcctgtaatcctagcactttgggaggccgaggcaggtggatcacttgaggtccggagttcaagaccaacctggccaatatggtgaaaccccatctctactaaaaatataaatattagatgggtgtggtggcgggtgcctgtcatcccagctacttgggaggctgaggcaggagaattgcttgaacccaggaggcagaggctgcaatgagccaagatcgtgccactgcactccagcctgggcatcagagtgagactctgtctcaaataataataataataaatacaattaaaaaattaaaaggaaaacccttggtcacacccaagacaaaggcacccccggccaccccttttctcctaagcctttgttctcttcttgtcctccctcctcacaaacattagcctgtgccatctggtgcccccgttcctggagtgtaccctcccctgtatcctcgtcctcctcactgattgctcctcccaccctcatgctcatcccagttgcactgcagtccttctcagaggtgctgtccttcttccaaaccacacatccctaagacccaggagtggggcgctgttgtcctcctccattcccaatgctccttccctcttcattaaaacaacaacaaaacaaaacaaaactccgggccgagcgtggtggctcacacctgtaatcccagcactttgggaggccaaggcgggcgaatcacctgaggtcagaagctcgagaccagcctggccaacataatgaaaccctgtctctactaaaaatacaaaaaaaattagccaggcatggtggtgggcgcctgtaatcccagctacttgggaggctgaggcaggagaattgcttgaacccaggaggcggaggttgcagtgagccgagatagtgccattgcactccagcctgggcgacaagagcaaaatttatctaaaaaaaaaagcaaaaacaaaaaaacccccacaaaactcctgttcctttaaggccagaaccacacggctgtcccaccttctacatctcatccttagaatgacctcccagtcaatttcactcttttctttctttgaagacaccagcactggtcagtcttcgtctctgccccaaactctgatgctggttccaaaggtctttagagcccaggtggacagcccgtccagcaccgtggccgtctcgtctctaatcaccctccattctgcctcacagcagaagtccccctcttattgtcctcggaaggccttgtcatcccccagagctgttccacctctggaatcctctagttttggaccacaacctcctcagttattccccacctcatagtcttctcttttcttgaatcctttagctatccaacagaatttcctgtgataagggaatttttctttattggtgctgtccaaattaggggcaactaggcaactaagctctccatgttactcatttttaattaattcaagttgaaattgaagtagctacatgtggtgactggctaccatattgaacagcacagctctagcccctggcctctctgtttcctcttccatcctgtcctgttttccttctttctttggcattgtcgccctggcccatcatatcagccacccactcccctttccttctgtcccacctcctggaaaacactctcaacttgagattaatccaactgtctctttctctaggtctatccaaaggctgctgggcgctgctggggaagagggcatgtgtgtctcatggccttgctggctgccattctttctcatagatagtcacaaacttcaataggccctttaattctgcccagcaagcattatcctcttctctctaatgacctcaagcctccagtgctcccagctcctcccccatcctcagcagatggtgtcacttcctatttcattgaaacaagagacacttggagaccacctgaccaccagttttacaagcatagttttatctgtcttccacctctctcctcctgctggctccagttcctatcaacatttaggcatggtcaaatagccttatcttacaaacaacaataaaaaatcccaaccttccctcaatcctatgtcaccttcctgctgtgaccctctatctttcctgccacttatattcacactttcttgaaagttgtctacacctgctatttccactttctcacctcccgttcactccacaaccccagacagcctggcttctgtccctaccactccctgcaaccactagtcaaggtcaccaatgacttccttgtagtttgatccaaaggacttgtttcagatcttatcttgacctttaaggcatgtgactcaacactgctcagcacccctccttccttgcaacgctcttacccattggtttctataacacccgagtcccctggttttcctcctcctcctctggctacttaaaagttttcttgaaactgccgcattctccccctcctagggtgatccgtctggcttcacaggtaagacagtgtgccaggaacggtgtttccgcctctcaacgcattccttgcagaaacacctggtgatttgctttctcacccaaaatctgcactgttgcgttttgaactccagtttgctctgtggatcccgctgcttagagcctgacatgccttcacgggtgtgtatttatcaccgccactttaagaacttctcacgacacttggacatctgtttttttcatttgtcccctcaacagacaggctgcgttaggaaaggacactgatgaattagaagggatggaagaggctgcagagtggtcagaaaacaatgtcctatgggaaatcattaagataactgggaacattttgcccagaagagataaaactgagggatgatagaggactggtttcaagaatctgaagaggcagagaaccttgatctgggctgctgtgtagcgtagggtttgggccacctgcagacttaacagagaggggggtttggaatggacgtagaggagttccaccgtattacaggaggttctagacctcctggatacaaggtgagtaagacagtcctgctcaccaggaactactaaagatgataagcgtagacctaagtgaccacaataaaactggaaggtgaccccgctcatcctctcctgaagacccctggcctaagctcagctggcaatgtagaaaagccacactctaccaagagccatttcaaacttactgccatg[214 bp omitted]gaggcaggagaatcgcttgaacccgggaggcagaggttgagaatgcgccattgcactccagcctgggcaatagggcaagactccatcttaaaaaaaaaaaaaaaaaaaaaggctctgtggacagaaacaacattcaggaggaaggcttggaaagcacttctcaatccagtcttgtagatgctccaaaaggtaccccagtcagctgagcaccccaatttgcttcttttccattcctctttgctggaatgtcttttcctgacttgggttttgatgcgatgccatcagcttacattcagggggatcacagaaactgtccaaccgagctcactgttgtgactgttttggggatgttgtcagggacgtttgctcattaccccatactgtgttccctttctgggccacgcccccacaagaaattcctatctgattttagtaccaagaatagttgtaattcccttgagcagtaggtctgtttttatctcatggacactgggaattgtgtaatgaacatggtctcctcattttagctgcaggaaagcttagggacaaatttgtggcccactcagaagaggtgtagaggttggaactccagggtgcattggacctgtatcctcctctcgactttgtctcccttcttagcttttctttgttctcttacttcatattttactgtgcaaaactgagagcatacaagcaaagataaataaaaatcacctgtaatctcattattccgagataaccactattaactgtgttgtctttttatgcatactttttaaaaaattaaaatgacattatactgtgtgtttttaatttgcttttttcatattataatatgtcatgaacatctttccctgtaattaagtgttctctaaatgatttaaaatttctgtatagatcaagcgacctcatactaacagctaacatttctatatgcatgtactatgtgcctggttttatgcatatttacatttgcatacatgagaaagcctatttatatgtgttacagacctgcaatatgtatgtctatatcccatcagctataatattcaaatgtgtcaactcacgtgatgctcacaacccagtggggtagaaagtattatctcccttgtacagatggaggaaaccaaggcatagactttccatagtcacacagcagaggcagaatttgaacccaggtaccctggctccgaagcgtttcctcctaagagctatgctgcctttcagtataccattgcgatttcacaggtcaccatggttaaccatttcatttatttcctttgacctcacttttaatttgttattgtgtcatattttatgtacccttgtaagttacctgaaatcctttctgccacaaggtgaggtaaggcataaataaacagtgcagagtgtggtaaacggcacaagaaggcacagctaaattgctaccccggggtaagaagatgaatccaggctgtcctgcaatggaatggatttattttcttgagctgtggtgagctcccatccctggaagagctggcttgggtggccgtctctctgggaggctggggaaggccttcttccaaggagacggagctgggccagacgagccccgaggccccttcttagattctcagggtttatgaaaatgccaataagacaaactgaggcacttaatggagctaatgcagcaaggcagcccttgggccggaaccaggacctggggcttttcatccgggtctattactggaccacacatctacaagtaacaaataaacgagcagagattccgttccaaactctcggcccagtgtattcctttcccagagctctctggctgctgttgcaagatgaccaaaggatgctgtcactgtcctcagtctttttattggggcgatggagaatgaggcaaggaggggctgggtggccccgcagatgccccatgacaccatcattcggcaaggttatgcatttgacgaatgccctgcagtggaaggagcccaggcttctcttcctgtttttgatgtttacttgggggttgatcttgtgcgagtttcttcagctcccgggaccctcagtttcctcatctgcaaaatggagttaatacaacagcaaagctgctgtggaggtcccatgagctattacagggctttgcacccttaaaaatgcggttgaggaagtaccgatacgcctgcctcaggggatctggggagggctgggctgtccccatgcctgagaccaggcaggcccgtcttggaggggcggtggccagcgtccaggtgctgccagcttcctaccccttcagcctcctgcccaccactgctcccttggctagaacgaagccgcgttcccgacagacaggctcacgcacggtgatatccgtgggagtgcgggcgagcagcccctcctcgccggaccccgggggcttcgggcaaaaatggagagcaggcagaggtcacatcctcctcctcttcctcacgctcccgggctgcgtgcccacaggggcacagccctgtgcgcggtgccaccgggggccatcaggctgggttagaggaaggcccgacctccgcgcagcaaagaaaacaaacacagatgtgtttggctgggaccgggagggagaaagtggcccccttcccccgcccgcgcgctcccccgggcgtgaggctctccgggcggcgcggggcgcgggcgaggctgacagtccccggcggcccctcctcccccacggggtgcgcgcctggcccggcccagccccctctccggggtttccccgggtgctctcctcgctttctctttgtctctgctgttctttctcgggctcccgggttcccacccgcctgtgctctccctctcgggcgtccgggccggttccctttaactttcttctttcccggggtgaaaactttgctcggagctggcggcagctcgcggacgttattggccggcgccccgcccggcggccccgccccccgcccccgcgctcccctccgcccctcactcccagcgcgagtggcggcggcggcggagccttcgggggcgagcgcgcgtgtgtgtgagtgcgcgccggccagcgtgagtgtgtgtgcgccccgggcgcgggcagggcagcactccgagctcggcgggagcggcgggagccgggcggccgcgtagtcactcgggcgagagaggcggcggcggggccgggaccggggctggggctggggcagcggcggccgcgccgggcatggagctggcaagcccgcgctgaggcgggacgcgcctgctagcagcgagcgagaggctctccggcgaccggcgcgcgggctccccggaggggccaggcaaacttttctttctcttttgccccctccagaggtaaagtcccgaacgcggactttccggcggggacgcgatcggggggcatctgagagggaccccgggctgcgagacgaaggggcgcgggccgtgcagagtcggggtcccccagctctcctgcgcccgaaacttggggtgcgaggggggctggtcgcggacggggagaccggctcaggcatgcccctcgggcggcgtgggggcggcggtggcggggaagcagagcgttctcccgccgggcggggaagaaggggcgcgagcggtgcggacttggagggccccggcttcgccgcccgcgggactttgggggagagaggcgggcagtcggctgcggggtgggtgcccaggaagccgggcgttctcccgcatctccgctcgccaccccgccgagagctggagggcgcggggcgggctggctgagcgcagctcccttctctccgcaggcgccttctgcggcaggcggacagatcctcggcgcggcagggccggggcaagctggacgcagcatgatgcgcgcagtgtgggaggcgctggcggcgctggcggcggtggcgtgcctggtgggcgcggtgcgcggcgggcccgggctcagcatgttcgcgggccaggcggcgcagcccgatccctgctcggacgagaacggccacccgcgccgctgcatcccggactttgtcaatgcggccttcggcaaggacgtgcgcgtgtccagcacctgcggccggcccccggcgcgctactgcgtggtgagcgagcgcggcgaggagcggctgcgctcgtgccacctctgcaacgcgtccgaccccaagaaggcgcacccgcccgccttcctcaccgacctcaacaacccgcacaacctgacgtgctggcagtccgagaactacctgcagttcccgcacaacgtcacgctcacactgtccctcggcaagaagttcgaagtgacctacgtgagcctgcagttctgctcgccgcggcccgagtccatggccatctacaagtccatggactacgggcgcacgtgggtgcccttccagttctactccacgcagtgccgcaagatgtacaaccggccgcaccgcgcgcccatcaccaagcagaacgagcaggaggccgtgtgcaccgactcgcacaccgacatgcgcccgctctcgggcggcctcatcgccttcagcacgctggacgggcggccctcggcgcacgacttcgacaactcgcccgtgctgcaggactgggtcacggccacagacatccgcgtggccttcagccgcctgcacacgttcggcgacgagaacgaggacgactcggagctggcgcgcgactcgtacttctacgcggtgtccgacctgcaggtgggcggccggtgcaagtgcaacggccacgcggcccgctgcgtgcgcgaccgcgacgacagcctggtgtgcgactgcaggcacaacacggccggcccggagtgcgaccgctgcaagcccttccactacgaccggccctggcagcgcgccacagcccgcgaagccaacgagtgcgtgggtgagtggggtgcggcggcggagccggcggcgggtggggccgcgggcgggagctgctgggcctcgcagcggcgagttcataggagcgcgggtcgagggaacggcgggaggcgcgttcgccgatgcccgggacccgggagggctcagagcaggtccactcgctcgcgtggcgctcgtggtggacgcccgaatttgcgcccagtgctctctgcgaagccaagaagcagcaggagaaatgttcccgggagggggtttggcagaacatttgcagataggtctccgctaaccctggatccaaacgcaaacattcattgccttccccctcgttgggttggacgctgggattcacctgcacccacccccctttcccaaggctgcagctgggctcgcggttggggaccccggcccagttcctgggaagttccaactccacacctacaaatcccttgggagatggcaaagaactgtttgtagtttggggtcagttcggtacccgacgagtatcactcctgccctccatttgtcttttcatgatttgaaactatttttgtctctcttttgaacagcgtgtttgtgttagcaaaagaagaatgatgtgatttcaattaattactatctgctgattacaacggagcgttcagtaattattttaaacgaattcaattctggtctaaaaaagtataccagattttttttattagcttcaggctttggtgaaattaaacagttttgaattaactaagggtccagcttctcactttttaaatagggtttcatttcctgaaagagaaatctgacaaaaccgggtgaatacggctgggtcagaaatgaagctaaaaaaggatacgttctgcttctgaattggacgactttgctgctgcagaagctctcagaaatcagtttctccccataaaaagaaaaaaagggtgaggggaggtagcaagactacaccttactttttcagtatgggaagtaaagctccaaagcccacatttatttgagcgaaaattatttagtctgtaaatgtcccatttggtgtgcatcctttatgaacgtacagatttttcctctccatctccccatctcaaacagccagtgtgaggctcttcaattgctttgcccctcttaggcacatttcaaagtttgctggtccccacaaacacacgttttgaggtctggttctgattaattgtgtcatgttgttgtcgaatagtttgtgcctcatgactgtggatgcagagttttgagcaagggaatggaaaacatgtcttggagggccggatcgccgcagaggcccagtcaggcgtcctggtctgaagacgccgggcctcccgcctcctgttgcaagggaggcctccatttttacgctcgtgtcccgctcttgcagacataattgtttgtcccctttcttttaaggatcagaactagtttccagtctgaagacacttttcaagatttcgcagagagagagagagtgtagttacactccgacttagtagtcttctagaataaaattcctttgatctgctcagttccctcggaaatgttggtttttcccatctcttcttttccccctccttcctcttttcttttcttccctttgtgcgtaaaagccctttattgacatttaaagggattcccagggttttgctatcagttttagtttgtatgtgcatatgaaagataactttgtcttgtcaccatcagggtctaattggacaaatgcaagtgaatacatttaggcgaataaacttgatgtggtggtgaaatttctctggcttgaagatttgccttagcgttggtattgttcagattcaccacccacccccaggtcttgccgtcagtttggatgtggacacgtaacctgcgtttgttataatgatggtcatgcacttgaaataatctctatagtttgggattttgtctcttgaccaaagcactaactatgcacacaaattggattgacctttttttttattggctaaattgagcaatcaacatattaacgaatgtaattagtaaccgtttttgttcaaaaagtttaattaggcttaataagtacataatctacatgacaaatgattggctaacaatatttttctgggttttactgaagttattttaattcccagtagttaaagtatctttaaatcttgccaattattcagtcatctcataaaagcaaagccaattcaactatgttaaagttatttatagtttcctttttgaatagatgttctgataccttgtagatatagctgggaacatcagattgaagttcccataaagtcttaattgaagtcttagtgatttttccatcattctgtaaaagagaaagacagcaaggacaatttaggggtgatttacaattaaaggttgagctttttatgaaaaggccctgtagtggagatatgtgaatgaattagtatttgacaggtgttctgagatactaaagggcactgtgctaggaaaaagcattaataaatccttcaaaagtaactttggactatcagaggctcagattttcctcccaacataatctcttcttgcgaatttcacgctgttgacatataaagtcaagctacccagagtatttacaactatggcaaagtcaagaagtatatattttttaattcccataatcagtcttaataacaatgagcctattactgtgctgtttggtctttgcttttataaaataatgatatgtgatttataataaattgaaatggtacccttccctaggttaaccctgtgccccaccctcccgcaaagaaaaccccctaaaatttaccaatttaccaatattatcatttgactgaacagtccttcgacatagggccatggtccttatagatgactaagaaatgcacatatcctatatgttttctttggtccagttttcttttcggtgttgtttcaaggtcaagctttctatggaataaaatgtgaacgttcataaagcccagttatactttaaatgcagttttggatttcttccggggggggggaacaaacaaccctcaaaacaatatgaaagacaagacgatgtataatgttacggccttgacagctctcagtggaataactaaatactttcttccgcccatatgtatcagcagtgttcacatgcttttatacacatgtgcattcacattcattgtgtaaagaagtacccatgcatggtggggctgtgtgtacattcaaggcaaaatgcatgaacagttgtaaaccacctgggttgctaggccccttcccccctccccgcccttcccttttttcaaaagagcatctgaagaccatattgtgtttcataaattatcgacatcagttttaatcattgtccccctgacgtcggagctgtgttagtatctagtatttagcatgacgaagcatgctgtttaatcttactgtggagttgtcagcatgagcccctgcctggcttgtgacaggtcgagcttatgaaaacttgttttgcgactcactctatggctttgcattgctcagctgtaacccaaaacccacacaaaaggtgtctctgcaagacgagcaccgtgctgggttggcctcttaatggtcataggtacctgcaacataatgcttgtgattgtttaaatgtggctgtgggttgggggtcgggggatgtcctcatgctgtcaatagctctggtgcttgggtccaccctcattcatccctggcaagagagggaggttatattggaggtgttgccatgagaaatccaatgccccactaaagattcttgcaaaaatcagaaagctgaaattatttgctgcttagtccagagcctggcacatagctatagatgagtgaatgtttttaatagtcataataattattatgattattgtcattatgatgattaaccctggaggacttactctttgccaagcgctcacattaatttagacatttaatcaccgtgactacgctaataatagggactgtaattgtacttcttttagagatgaggaaaccatggcctagagacattagatggtttaccctaagtcacatagctactgggtggtgaagctgggactccagcctgacgtttgtgctttgttttgttgtatccactgtgctgcttttccatagaatgaatggatgggtggatggaagaatggatgaatgaatgaatggcagtgatatatccatgtgtaggagaaaggctggaacaacctattgcttcttgctagaactgggcgtggttccctggttgtgttgcattatgtattttacatcatattattatattttattatattatattcatacatacttaacatgaagttgtatataagaagttttcttttatcttagccatcaggcctgctgggagctgggagttgggactatgaattaagggggtttagatactttcctgggggttcttggcatccacaggtgttgctttcttggccaagtctttcttgatttcagggcctgtagtctctttcaaaggtggcgaagctgagctgtgggtagtcagaacccctctttaagaaggccttcctccagcctggccaacatcgtgaaaccccgtctctactaaagatacaaaaaattagctgggcatagtggcgggtgccggtaatcctagctactagggaggctgaggcaggagaatcgcttgaacctgggaggcggaggttgcagtgagccgagatcacgccactgtactccagccctagtgacagagtgagactctgtctccaaaaaaaaagaaggccttctcttttcaccctagtgttcactatccctttgcttcactggaacgtattgaaaaaatccagaaagtggctgaaactattgttgacaaagagaggaggtggatgggggatggtatgtcccggccactggtgtggtgccgctaggtacagttgacatgagtcagcagcacagggctgtcattcatctctactggccccatggcagctggagtgaggttctctgctggggtcctcattagcacctggtgatcaggaacctcgaggcaaggaggccgctccctgctccacccagagcagggaggcaggttcgtcaggggaaaccttctggggtgggtctgcgtgtttccaggctctgccgtgctctctattagccctgcccagttttctctctgacctcctcctcctgtagaaaaatgagatcctcagaaaactatttgagactttatgtccagagtaaatattggaaaggcagtgggttgaaattcagatgttccctggaaggaatcccctcgttttctgctcacagctggtgtcgatatttccttcttgagatgagttgtgcttttcattaagtaaattttttgtcttgggattaaaccaacattgtattcttaatagactttcatgtttacacttcaaatgtccactggattgttactcatgttatcttgatggcttctacggtgtctgcaatgcacactgcctttaccaaaataaatggctctctagggaactggattataaaacagccttatctgtggatgcacaaatacggatattttgtgagccaatattttttttttcatcctttcagaaggtgttaatcataccttgggtttctgtagtgcctttcattatagggagacgggaggtctcggagggcttttgaaatgctcaagacttaagcctaatacttgtagagcaggcccacagcattttgcctgttgtctggaagcccttgtggtctctgcaggctcagaaggcatggtgttggtctgggtggcctgggagctgtggagtttaaaatgtccgtccatggtggttggggggttgcgtcctgaagacagaccacaaactcctattgagtgccaggcattgtcctaggtgctttatatgtgctttgtttcaattaatcagattgccacaaggaacggaagcttttcaaagacagatgtcctggccatcaaagggcagcttttacacaaacgggactaagtgtggataagtctgcagggcacgtctcggcttattctgtgacactgttgcatgcagagagagcagggggtatcaggagcgtttgcttggaagactgatcacataaaagccgtgtcctattatagccaactcggagggacggttgttctgaatagtacttgaaagaagtgagctgcctgggccagtcctgtagatacagacgttcacctcaaagatatctgctctcatgaggtttgacttgcgtagcacaacttagtgagctcagtattgcattcctgtctccttactccaaaaatggatttctattgtaaac[138 bp omitted]atggtgaaaccccgtgtctactaaaaatacaaaaattagctgggcgtggtggcgtgtgcctgtaatcccagctacttgggaggccgaggcaggagaattgcttgaaccagggactcggaggttgtgatgagctgagattgccccactgcactctagcctggcaacagagcgaaactccgtctcaaaaaaaaaagaaaaagttacataatttatgtgaatttccccccacatcaaaaggccttggctaggtgtgtattcagccccaaatacattattttgtgccagttctcccctctgatggagagaagggactgtggccatgtgattgatgagatacagaatgtctcccatcagacccttttctttttctcccagagcttaagttcctgccccaagcacagttctatcagaggcagctgctggcactcagagcacaaaggaagatactctccgaggagaaaggggtacctatggttcaggagtaccgccaaggaatggaaagctgtgctccgctcttgcctgtgtcaggaccacccccagcaatccctggaccttctgtcattgggattagtgtactaactacagttagggtgaaatgaattcacactgcagtgcatt[136 bp omitted]cagtgaaaccccttctctactaaaaatacaaaaattagtcaggcgtggtggcacgtgcctgtaatcccagctacttgggaggctgaggcaggagaattgcttgaacccgagaggcagaggttgcagtgagccaagatcacgccactgcactccagcctgggtgacagagcaagactcagaaaaaaaagaaaagaaaaaaaaaagaaagaaaagaaagatggttctgtaagtgtggtagacctccggattatttaaagggttcaagtaaatttgttgggtgagaactttaaaagcagaaagtaacactccagttcacttctcaactcagctagtgccttgctgaggaaggtgctagaagtctgtctccctggaggattcaggaattggcctgtgtaaggtctcagctcgctgcacacgtggtcatattttagttgggaacccatctgtgccccctcctggctggtgctattgctagattttctagatttttcccgtgtctttttctgcctgaagatgagagattattggttgttgtgtccaattttcacacatcccagagactccacacttaattgagacaatctgtaggactacagggacctctaaaggggctggctttaaataactgagtcctatgtaaggaaatgaggtagatctctgagtttcctgagggcctgtatgctgtgctgcattccatatttgaagtccccaagtgagggacacttcctgcctgcttgattgccattgtcagggcttctgatttcgtctgtttctgctttggggcggccgtggtgagtacccagcaaataaatgtaccaccactcccgcattctaaaaccagggcagacattggcaatcaacggcagcatgctttcctcctaagtcgagaaatgatcttataatattagactcctcaatataactccttaggcagaattagcccatgagatgaaaactatctgccatttttggtccccttctgaagaccttccccttccccaacctgcagacagagaagtactttgtatacatggacatttctggagcatttactgttcaggtggctctgtttggtctgggcatgtaaagaaatgtaaagtagaccaggtgcggtggctcacacctgtaatcctagcactttgggaggttgaggcaggcagattatttgaggtcgggagttcgagaccagcctggccaacatggtgaaacctcatctctactaaaaatacaaaaacaaacaaacaaaaaaaactagcctggcatggtggcccacacctgtaatcctaactactcagaggttgaggcaggagaatctcttgaacccgggaggccgagattgcaatgagtcgagatcgtgccactgcactccagcctgggtgatagagatggtgtctcaaaaacaaacaaaaaaagaagataaaaaaaaaaaagaaaagaaatgtaaagtggatgccctccctgcaggtgaaatatgtttccatcaaggaggctgtgcacgtgagaaggtgcagacgtgtccacttgcactaaccctgaacagggataggcgcccccagtgaggcactttgctgagtgtccggggtgcagggaggggccgagggtcttgagaggaagagcattttggatttggctcctgtaccacgaaaggattggattttagtccacatcacatttgcctgctgcattggttctgttgtagtgtatttgttttctcccatgccaagaatttgagagaccatggttccctgaaaagagtggtcccccaaggaatgtccgccccgacgtttctgggcaggtcctccagaactgccttggattttgaaacaaaagcttatcactgtccctacactcaaaagaaattatgccccaacctgggccaggaccctggtgcctgaggcttcctggggcttctcccacgtgaaggtcgttccttccactcagaaccacatctgtgtggtattgagggacgaggactcatctccgtcacaaaccactgccctcagtgctctgcttacgtttgggctggtgcagaaagtgccgaacaagaatagttccaatcccagcatgaaaaagaaaacacattgtgtttacagatacagaatttggcatctgaaacgtgaaagtacctttgggttgggcggccccagggcagagctgttggacacggcccccccagcccctaccctcagccctttggccagctcgttttcctctccccgaagccagacctcagaggtgggcaggtcgatctcagccaactctttattccgacacccagccctgtttcactctatggctcagaaccgggagagaattcacggtgagaaagtgcttggccttctgagctgccatgaggaaggaaactgcttcttgctccaatccacagaaatcaatccttttttttttttttttgacagaatctcactctgtcatcgaggctggagtgcaatggcaccgtgtcagctcactgcaacctctgtttcctgggttcaagtgattcttctgtctcagcctcctgagtagctgggattacaggcacccaccatcacgcccagctagtttttatatttttagtagagatggggtttcaccatgttggccaggctcgtctcgaactcctgaccttaggtgatccaccctccttggcctccaaaagtgctgggattataggtgtgagccaccgtgcccggcccaatcctttttaaaccatgtttttgggcagacttgccatcctggtacccagaaatgctagagaagaatggggctgaacagtcctatttcttacctcagtttattgtttgaaccaggggtagagaggttgtttgtttgtttgtttgttttaatagaagatgtctgcagaagaagtgaggcatatgtaagtgagaatcaagttgcgattttcctgatctgtagaaagtacttagttctggccaggcacagcagctcacaccagtaatcccagcactttgggaggctgagacgggaggattgcttgagcctgggagtttgagatcagactgggcagcatagcgagactgccgtctctacaaaaataaaaaagaaagtacttagttggctgggcatggtggctcacgcctgtaatcccagcacttcgggaggccgaggcaggcggatcacctgaggttgggagttcgagaccagccagaccaacatggagaaaccccgtctctactaaaaatacaaaattagccgggcgtggtggcacgtgcctgtaatcccagctacttgggaggctgaggcaggagaattacttgaatctgggaggcggaggttgcagtgagcagagatcacaccattgcattccagcctgggcaacaagagcgaaactctgtctcaaaaaaaaaaaaaaaaagaaaaagaaaagaaagaaagtacttagttacttagttttaagtcaagatcagagagcacaacattctatctactaaagtgtgaaataccaagatacatgtattagggacaatggtgagagaacacccgtctttgacttcagactggctgggtttaaattccagttccaccaggagtgtggacttgggtaaattaagctgtctgtgcctttgatgccttggtgtcctgggggcccagctcaagaccaccttgatagattggatagggtggggagtgtgaggagccctgtgttctgccttgaaagagggctcagaggaggggtacaggaaggagacccagaggtagggttctgatcctagaccttgggattttatcagcacacatttctatagcctttattatcaccatgtactgttctaagccctttataagtattacctcatttaatcctcatagcggccctatcagggcttgttattctttttttttttctttttctttttttttaagatagagtcttgctctgtcacccaggctggagtgcagtggtacgatctcagctcactacagcctccgcctctcagattcaagatattctcctacctcagcctcccgagtagctgagattacaggcgtgcaccaccaagaccagctaatttttgtatttttagtggagacggggtttcaccatgctggccaggctggtctcgaactcttgacctcaggtgatccacccacctcagcctcccaaagtgctgggattacaggggtgagccactgcgcctggccttgttattcttaagtaaacttctttattgtagtgtaacacatgtagagaaaatcccatgaattatgtgtccagtgcaaagactattcatgatatgcacacgcttgtataaccagcacccgcatcaagaacataccagcaacccagaagctgacctgtgcgtccacccagttaccacgccccctacccaccatacatgggtttt[133 bp omitted]gcctc[133 bp omitted]cagcctcccaaagtgctgggattacaggcatgagccaccgtgcccagacgggttttgattatttttgaacttggtataaatggaatcatattctggcttcttttgctccatgttacatttgtggtcttcatccatgtatagtagtagtttcttagtttccattgctggccagtattgtgtgatataaatgtatcacagggtatttctccactccacttacggcaggcatttgggctgttcccaggttttggctattaacagtagcactgctgtgaccatacttgtccatgtcttttgatgcacatctgaatgcacttctgctgggtgtgtatcaagaaggggaattgctgggtcctagggtttgggcatctgttcaatttcacttttatttttaacattttttgagacaaggtctctgtcacccagcctcctgtcatccagctttctgagctcaggcgatcctcctgcttcagcctcctgagtagctgggatcacaggtgcacatcaccgcacttgggtatttaaaaaaaattatttgtagagggttgggcatggtggatcatgcctatcatcccagcactttgggaggctgaggcaggtggatcacttgaggtcaggagttcaaaaccagcctggccaacatattgaaaccccatctctactaaaaatacaaaaattagccgggtatggtggtgcacgcctgtaatcctagctacttgggaagctgaggcatgagaattgcctgaacctgggaggcggaggttgcagtgagccaagatggtgccactgcactccagcctgagcaatagagcaaggctctatctcaaaaaagaaaaaattatttgtagagacgggggtctcactatgttacccaggctggtcttgaattcttgggctcaagggatccttccttctcagactcccagggtgctgggattacaggcgtgagccaccatggctggcctgttcagctttaatagacagtggttaaactctctatttagtggaaagtggttgtacaaatttatatctgtatacagttttacaggcaaagaaactgaggcacatggaggttagttaaggtgcctgaggtcacacagctagcaggtggcagaactggaattggaatccaggcagtgcagctctggaggcttgcttttcaccactgggccaagtcgtctcttatctttttttttttttttttttttttttttgtagagacagggtctcgctctgtcatccagtctagagcacagtggtgcaatcacgtctcactgcagccttgaacttctgggttcaagcaatcctcctgcctcagcctctcagagtgcttagattacaggcatgagtcacctgcttggcctgccacttatctttaatctgcatactccctgacaggaaaactagtaatactgggaagcaaaggtgactttgtacaagtgtctttacttctctgggcctcagttctctcctgtaaaacgaggggttgggtcacaaaggtcatgtaatgatattctgtaggtctagtggaatatactgccttcctgaggacttcttcagtcttccttaacgaactcaccccattccctgctcaaccagaagcagctctataacttgaatgatacattttccaaccctacccctccactggggttccctcaaaggactgctcaggctctaactggaggacctcacttgggcctaccctccaaccctactgacaatttccccacctcccactctccagctcttccacttgcaggggtggggacatgggactctccctctttgccttccagtgtgttcgctagctggtcttctctctttaaatcatgagtgttcaggtgtatgaattttcacaaagtgagctcacctctgtgtctaccactaacatgaagaaatacagtatttccagaaggctcctcccaaccccccagggtaaccaccattttgacttccaacacaatagatttaatttgcctatttttgaactttatgtaattgaaatcatactgtatgttctcttcaatatctggtttcttttgctcagccttatttccttgtaaatagtcttaaacataacttttcctatagtctttgttagtttgatggatgatctcaacttcttggggatactgatcctctcgcttattttgtctgctgacctttgctcatggtgaatgatttccttatgtgttttgtactttctgactgtgagcttatctttatttgggatttcgtggaaatcccactgctgttagttatggaaatgcccctatccatatgattttgcattaattctgccagacattctagaggtatcactggactaggaccaaattttccattaattaatcatcttgaaaattattatatcaaatgaggagtatgtacttggcctctaaaccttcccaggcctggggtttatttttctccctcactgaggactttttctgcctttacccagaactctaggtagagacaaatttttgctgtcaccttagcccgatggacaaagcttcttcgtccccttttgacccagggggcatttggaaggtccaggtttttctgctactgcgattacagctgcagtttcctagctggtctcccttcctttatctttgtccctcagcctccctggtctcttcttaacacagcagccagaggtaactgcctgtgtgttagttccctgttcactcagaggaacacccagaacacttacaacggttgcaaagccctgtgtggtctggcccctgcttcctctctattctcatctcctggcactttgctgctcactcagtctgttccagctcccaggcctccttgctgttagtgggtacacagcttatagccctggtacagcagctgagtctgggcttgagataggcccaaatatgcaaataaatgactccctaggttccttcaagtctttggtcaaatatcacttctgtgaggcttacccggactattctatttatactgcaaacagctcccctatttgtgtctatcggactctctctctctgtgtctctctctctttctctgtcttctcctctctttctctctctccacacacacacacacctgagatcacccttatcctcccctactaactccttttccccataacactcataccacctaagacactatttaatttacttatttattatgttcttaattgttttcccctcctcccatttgttcctttctatcacttgttggaatgttaaggtacataaggtcaggaattctcttttattcacagggggcctggcataagtaggtgcttattaaatatttgataaagaaagcaggggtcccatttgcaactcctgggcttgcaagacctgaggccttatctccggtctgtgtgtgggtgctaaatcctaagctcaaggcattaaagcctgtttccaggtctaataatcagtcagtctttcccctttctctatcctccctgctgttccctccctcctcccacacacctcatgatcactggggtctcagggtttctcttaacactttggctttcagatttttctttcctctagcacctggggatttccttttatttcttatgagatctgctattcattaaatttttttaaacttacatttcatctagtatttctagatgcttgcagtggtaggggttctgcattacctcagtccaccttgttgccagaactcgaagtaatatattttaatctttcacacatctggaattaatcgtgacatatggtgtgaggtaaggatatccattttttcatcaaatatttagccagttattcagtgacaactattgagaaacatcattttttgtcactgatttgagatgccatatttattaaatgcttaagtattatataaacttggatctgttctctggatttttccattttgtttcacaaatctgttttcctgccactttctatctgtttggatatttcagtatctggtaggttcagtattcactcattattcatctgttcattttcacttattctcattgctattcttgcttgcttgtttctttatatatttatttattggctttagatgagtttgtcaagtttcattacaaatgccattagtaatttgacagcagtgttgttaaaatgaacttggtgatagttgaaaacattgtaactgtatcaacatgtctcttgtatgtaatgatttgattatttaaatgtacccaatagggcttttaggatatcagaaaagtaggttttaagtctggtcaaaatcatgaattgtacttatgtgtttctctttgattcttccagatgatttttttttacagatttattgagatataattgttcagtaaattgcacatatataaaaagtataacttggtaagtttgacttatgtatacacctgtgaaaccatcaccacaatcaagataaataacatatccatcagcccaaaatgttcctgctgtcttggtaatccctcctgcccctttccaccatggtgccttctgtcattgtatatctgtttgccttttctagagttttgtgtaaatggaatcatacggtacgtgtggtctggtttctttcaccttccatgcttagttggattatttattcatccatcatgttaagtgcattaatagttcaatcctttttatttctgggggggtattcattgtattgctataccacaatttttccattcacctgctgatgggcatttagcttgtttctagtttttggctattacaggtaaagcagctatgaacattcttttagaagtctttgcatggacatacactttcatctctcttgggcaaatacctaagagtggattggctggatgatacagtaggtgtaggtctaacttttaataaactgtcaaactattttccaaaatggtagtaccactttacatctatatctgcagtgtatgagagttctagtttctccagtccatttcctcatcagcatttgatatggccaatcttttagaaattttagccattccaatagatgtgtggtagatacccttccaattttaagttttacaatttggaagtatagaacatctacatttatttatgtcttcttttatgctattcagtaaggttcataaatttctttatattagcatcacacattttttcagaagagtttacttctatgtatttataattttgattactattatgaaagggattttttccttctcattttattttctaagtgggtattacaatgtatagaaaagctatgaactatatatacatttttatgtattttgcaaccttcagctttactaaactctttttaattcgttctcacagtgtttcagtttctctggacttcaactatatatatgaatattttagcccttcttttccaatacttgtactatttatttttcttgtcttactgcattggatagaatgtcaaagtaatggtatatataataatggtaatgtactcttgtattactactgatttaagtgagcacatttctagagtttcattgttaaatatgttgtttgttgctagtttcatatggatgttctttattgtactcaatggagagacctctattcctgacttactgggagggttgctctttcttacttttttttttgtttgtttttttgttggagagataaggtcttgattggttgcccaggctggagtgcagtagcatgatcaatcatagctcattgcagcctcaacctcctgggctaaagcaatcctcctacctcacactcttgagtagctgagactatgggtgtgcaccatgcccagctaattttttaaagaaatttttgtagagatgaggtcttgctgtgttgcccaagctgatcttaaactcctgggttcaagtgatcctcctgcctgagactcccaaactgtgctctttttttaaaaaatattcaagaatatgtagaatgttaatcctttagatattaatcaaaatgatcatatcatttttctgctttgactattaatgtaatgcatttctttaattgatttctgaggtataattcacatgtcatacaattcacccatggaaagtggtttttagtatgttcgtcgattggtacaaccataactgaaactaatcctataacatttttgtcatccccaaaaggagctttctacgaattagcagtcactttccatccttcaccctgatctgcacccacaccctaagtaggcttttgatctttacagatttgcctattctggacatttcatataaatagaatcacgtaacatatggccttttgtgactgacgtctttcaattagcataatgttttcatggttcatccatgttatagcagtacttcatttccttttaatggctgaattccattatgtaaacatatcaaattttgattcattcatcagttgatggacatttgagttgtgtccattttttggctcttatgaataatgctgctatgagcattggtttacaggtttttgtgtggacatctgctttctctggggtatctacctagcagtggaattgttgggttataagacaactatctcatccaggtgcggtggctcatgcctgtaatctcagcactttgggaggcggaggcgggtggatcactggaggtcaggagttcgagaccagcctggccaacgtggtgaaacttcgtctctactaaaaatataaaaattagccaggtgtggtggtacacatctgtagtcccagccactcgggaggctgaggcatgagaattgcttgaatccgggaggtggaggttgctgtgagctgagattgggccattgcactccagcctgggcgacagagtgggactctgtcaaaaagaaaaaaaaaaaaaagacaactaactgtgtttaactttttgaggaatgccagattggttttcaggcagttatactgttcctaggaccctagaacccaccagcaacatatggggatcctagtttctccatacccttgaaaacacttactatctatcattttgattatagccattctggtgggtgtgaaggggtatcttgttgtgcttgtgtgatttcctaagtttgaaatattccagcattcttggaatgtatctatttggtgatgtgttattctttactaacattttattttagatttttatgcctatattcaaaagtgagatttgagctgggtgtgatggcgcgcctctctagtctcagttctcgagaggctgaggcaggaagattgcacgagcgaggggtttgaggctataatgcgctatgactgcacctgtgaatagccactgtactccacaacatagtgagactctgtcccttaaaaaaaaaaaaactgtgaggctggcgcggtggctcacgcctgtaatcccaccactttgggaggccgaggcgggcagatcatgaggtcaggaattcaagaccagcctgaccaacatggtgaaaccccgtctccactaaaaatacaaaaattagctgggtgtggtggcgtgctcctgcagtcccagctactcaggaggctgaggcagaagaatcacttgaacccaggaggcagaggttgcagtgagccgagattgcgccactgcactccagactgggcgatagtgcgagactccatctcaaaaaaaaaaaaaaagtgagatttgtctgaccttttgtcactttatattgccttttgtatcaaggctgttttaaccttataaaatgaagtgggaagtttccattctattttatgctctggaatagtttaagtaacatgagaaatagctggtccttgaaggtttgttagaattagcccatctgagccctgtgtcatttttgaaagtagttatttgacaaccatttcaatttcttccatacttatgtgtttattcagaaatttttcaactgctttttgagtcaaatctggtaatttgtttttttttaaaaatcatttacccagattttcatttttcaagcataggattctatataataatcactaaaatattttttaatgttcatatatggctatatcacctttctaattgctaatagcaaacattttttctcactctctctttgcctaggtttgtttgctttttgtacatttgtgaaagtgataataataacatttgatcatatttaatgaacactcactgtgtcctagaccctatgctaaatattttggatgcactttctaatttaaaaaatctataacactgtgaattgagcaaaattattcccattttacatatagttgagtagttaagaaatttagcttgcccagagtcacagagctgcaaaacccagggccggaattaaaaaggatctgtcagttttcaaagcgggttcttttatccactattccagactgctgcttatttttaaatgcttttttatcatcttctaattgtctctctaatctctctcttttttttttttggttgagatggagtttccctcttgttgcccaggctggaatgcaatggcgcgatcttggctcaccacaacctccacctcccgggttcaagcaattctttctgctgcctcagcctcctgagtagctgggattacaggcatgtgtcaccacgcctggctaattttgtgtttttagtagagacggggtttcaccatgttggtcaggctggtctcaaactccggacctcaggtgatccacccgcctcggcttctgaaagtgctgggattacaggcgtgaaccactgcacctggcatcatcttgtaattctcttaatttttttatctttattaatttcttacctaggcttctctgtggttatcctaattttttgagttgaatgctcagttcaactaacattattttcttattcctgttgagcattaaaactaagttaatgacttttcctctctagagtagcgttgaccacttcccataggttttgatttgtgctgctctcattgtcactgtttttacaatgactgtgtcattgtagttttgatattccttttgttcctggagttatttatgaattgggttttcatctccaggaggttatatcctttaaaatatttttttaaatgtccaattttttttgctgtttccggtactttttttttttcctttttggggcggagtctcactctgcggcccaggctggagtgcaatggcgcgatctcggctcactgcaacctccgcctcccaagttcaagctattctcctgcctc[133 bp omitted]ctcagcctcccaaagtgcaggcattatagacatgagccaccacaccccagcctctggcatgttttttagtttggtttttgtttgttttttagaataatctcatgtgtatgtaagatcacctcttgtcagtgttccgcaggaattgaagaggaatcctgtttgtagggcacaatgtttatatttattgactcaatctaattgggattttattctccagatactctatattcttgttttcctttttgcctgcttggggcaaaaaaaaatattcatggaagtctttaacatgtaactcgatcttccacagattaagtgacaaagtcattcaacttcttaaatattaacatgtgcaaaagtacataaggcaaattagcacagagtaaaagcggggggtcacaaaacagtatgcgaaaagtagaattcagagcagagtacattatacacaaagctaggttaatttgtacagatacaggaaaaaaatgcactgtcattaacttgaatggattatgaccccggcctcggactcctccttggtacacaggggaagttggcctctcagttctttcccgtgctcacactctaggatggtggttttggggttcactactaagtgctgccagggatggaattaactgggaataggattagaagcaaagaagaggccagaatgattcctagcctgaagctggagcagtttgagccgacagctggggctgagtttattgctttggctcactcccgtctgtacatgagcatctgcctcattgccttttggcctggcaaaggggatttgctgaaatagaaatcagtctgcaaggaaaggatggtgaggccacagcgactcactgacatggggtgccacctcccgtcatgaaatatgaccccaaatggcttggtttggctgtgggatatgccaacaccacccccgggagctctcagctctgtggaagagcatttccataggcagcttcctacagaaacgggcaggcgacccagcttcacgcctgcctccatttctccttatccttctgccaaggggtgattaattcatggaagaaagatgggatgctaaagagaggagtgtgtttcacagaataccagaaccatgagaaaggctgaaaattaatgagctaagtatctaatttaagaagttagaaaaaaattaatagaataagccagaaaaggagatgggggcagggaaggagagataaaaataagagcagaagtcaatgagccagaaaacaaatattcagcagagaagatcaacccaagccaaaagttgattgtttggaaggactaataaaataaacaaatatctggaaagattggtcaagaaaaagaggaggcacaaatgaataacattaggaatgaaaaagagacataactagagatccatcagagacttaaaaaaagtaaggtaatgtgataaacaactgtatgctactaaattttctaagtgtcatttccgtatcatcattagcaaacccctggagaatttcaacagagtggtccatagaccacttgaatcaaattcttaggtggaatcaaagaaaaaacataaattggactttatcaaaatttaaaacttgtgcttcaaagatacaatcaagaaaatgaaaagacaacccatgggatgggggaaaatatttgtaaatcacgtgtgatgaaggtgtagaatgtgtaaggaatatgtaataaatcttagaactcaacaacaaaagacaacccagtttagaaacgggcaaagaacttcagtggatgtttttccacagaagatacacaaatggccagtaagcacattaaaagatgcactaaatcattagccatcagggaactataaatcaaaaccacaatgagataccactttacattcactaggatggctatacttgaaaagaaaggtaataacaagtgttggtaaggccatggagaaattgaaaccctcatgtactgctggtgggaatgtaaaatgatatggctacttttgaaaataatcccttccgaaaccccccaaataagagtccaggcatggtggctcatgcctacgatcccggtacttcgggaggccaaggtggaaggattgcttgagcccaggagttcaagaccagcctgggcaacatggcgaaaccctgtctctaccaaaaagatgaaaattagctgggcacggtggtatgtgcttgtagtttcagctactagagaggctcaggcaggaggatcgcttgagcccaggaggtcgagttacagtaagctgagattgtgctactgcactccagcctggttggcagagaaagaccctgtctccaaaaaaataaataaataaaaaagagaaaaaacaaaagaaaataatccctctgaaatgagttgtgatacgatccagcaattccattcctagatacacgaacacaccttacagatattataggttcagttccagaccactgcaataaagggagtatctcaataaagcaagtcatacaaattttttggtctcccagtgcatataaaagttatgtttacgctatactgtagtctgttaagtgtacagtagcattatatctgaaacatatacatatcttaattttaaaatactttattgctaaaaaatgctaacgatcacctgagccttcagcaagtcataatcttgtcactgttggagggcttttcctcgctgttgatggctactgactaatcagggtggtggttgctaaaggctgggtggtaatttcttaaagtaagacagcagtgcagtttgccacatcaactcactcttcctttcatgaaagattttgctgtagctgcataatagtattttacccacagtagaacttttttcctaattggagtcgatcctctcaaaccctgctgctgctatatcaaataagttgatggaatattctaaaacctttgttgtcatttcaacaatgctcatagcatcttcaccaggagtagagtccatctcaagaaaccactttctttgtcatccataagaagcgactcgtcatctgttcaggttttatcatgagattggagtgattcagtcacatcttcaggcgccacttctatttctagttcttttgctgtttttaccacatctgtaattatttcccccactgaagttttgaactccttaatgttatttatgagggttgaaattacttccaaactcctgttaatgttgatattttgacctcctctcatgaatcacgaattttcttttttttttttttgagatggagtttcactcttgttgcccagactggagtgcaatggcgcgatctcggctcactgcatcctctgcctcctgggttcaagggattctcctgcctgggcctcccaagtagctgggattacaggcgactgccaccacgcctggctaattttttgtatttttagtaga[144 bp omitted]atggtgaatccttttcagaaggttttcaatttactttgccaagattcatcagaggaatcaccatctgtgcagctatagccttacaaaatgtgtttcttaaataaagccaataaaaacaataaaaacaaataaaggcttgaaagtagaaattactccttggtccatgggctgcagaatggatgttgtgttagcaggcatgaaaacaacattcatctccttggacgtctccatcagagctcttgggtgatgagatgcattgtcaatgagcagtaatattttgaaaggaatcttttttttttttttctttctgagcagtaggtctcaacagtgggcttaaaatattaagtacaccatgctgtaaacagatttgctgtcctccaggctttgttgttccatttatagggcacaggcagagtggttttagccaaatttttaagggccctaggattttcagaatagtaaatgagcattggctttaacttaaactcacctgctgtattagcccctacataatcagcctgtcctttgaagctaggcattgacttctcctctgtatctatgaaatggcgtcttcgtccaatagaaagctgttttgtctacactgaaaatctgttgtgtagtgtagccactttttttttttcttttttttgagacagagtcttgctctgtcacccaggctggagtgcagtggcgcaatcttggctcattgtaacttctgtctcccgggttcaagcaattctcctgcctcagccttccaagtagctgagattgtgggtgcccaccaccgcacccagctgattttgtatttttagtagagatggggtttcaccatgttgttcaggccggtctcaaactcctgacctcaggtgatccatctgccttggcctcccaaagtgttgggattacaggcatgagccaccgcgcccggcggaaaatgcttcttaaaataagcatttcttagccttttcctggcttaatgaagtaaaatctctgggatggagcctagaaatctgcactttggtgaatgcattagatgaaacaagtgtacacagagttttaagaatcactgtccactgatttcagtagaattccaaataataattgtaaaaaatgaaatgaaagaaagaatggtgaaaatagaaaatcaccatttgacaaaaagttcgtggtaatagttggaggcaagaatcacaaggtctgctaaagttagggggtaaaaatatgatgaaaaatagaatatttgcataatgctagttagagtaccttcccgcaaccacagaaggaaaaagaataacttacagtgaagaaacctaaagatgccacctgaaccaactgatcagaattaacatcaccagtaatgggccacctgaaccaactgatcagaattaacatcaccagtaatgggccacctgaaccaactgttcagaattaacatcaccagtaatggacatagtgacatcatgtgccacctgatatgtgatatgatggcccaggaagaatactttgcttctgcaggattcttgctaacctgaatttaattttgaggaaatacgagatgatcccaaatgagagacattctagaaaataactggccattactctttaggactatgaaggtcattaaagacaaaaagagactgaggaattgtcatagactggaggagactaaggagacgtgagaccaaaaggcagtgtaagattctgaattggatctagacaaagacatgtgcgggacagttggcaagatttgaataaggtttgtagattaggtaatagtattgcacccatttcgattttcgggttttgatcattgtaggatgggtatgtaagagagtaatatctgggggaaactgaatgaagagttcacagaaatttgttgtaccattctgcaactttttat[218 bp omitted]ggctgagg[131 bp omitted]aataataacaataaatgtcactgcccttgagcatcgtgagtcctgctttgaaagctattggtgtagaaggaacttgggctttggaatcatacaaaccctagctggggccaggcgtggtggctcacacctgtaatcccagcactatgggaggctgaagtgggcggatcacttgaggccaggagtttgagaccagcctggccaacaggacgaaaccccatctctactaaaaatacaaaaattagccaggcatggcggtgcacgcctgtaatcccagccactcgggaggctgag[139 bp omitted]ctgtcatgtaccagctaaatccagagcctctcagcctcgttttcatctgtgaaacggggatgaccatgtctatgtcctaggatcactggaagggtaaatgaaatgatgtatgtgagatgctaagtgcagtgcctgccttaccaggtgctcaggaaatgctggccctcccctgtggttcaagcacccagagatattttctccatgagtcagctcccagtctccctcttgccctggagcaaaagaaccaatcctgtccactaggctgtttcagcttggcaaggagccatcgaagccccctgtcctgttagctgagaaaaggtgtgtcctgggagagagaggattttgacccaggttgagatgggaggtggctctggcaggcagaggacaccctggggaccctcgggaaggcagcctggcctgggagctttctcacaggctctccttggcaggccacttaaagttacaccgacttcaaacaaaaagggtttgcagacacaaaagaaggctcaacctggccagtgccaggcctggcttggtatttgagttcagaaatccaactccttggagctcgcagacaggccccaccatcccggtaaacactccaggaatgccaagaacctgccttagagctcccctcccgggattgcttctgttgctgaccctgggtccggattcgttagaggtaaataagagccagtgctcccagagcggggactgtgcaacaggccaaggtggggctccttgtacctgtcttcaattccaacccctctccactttgcagtatgtgggtgtatgtgccgggctagttttcttaatggattatttttcctccagctttattgaggtataattgacaaaaattgtatgtatttacaatatgtaacatgaagttttgctatacatatgcattgtgaaatcatgaccacaatcaagctaattaatatagccatcacctcacgtaattatttttttttgagtgagaacatttaaggtctactcccagcaattttgaagtatacagtacattcttgttagttatagtcaccagactgtacaatagatctttctaacttgttcatcctgtctaactgagaggtgattttgtaccctttgaccagtgtctatccatcccccgcttaattgattattttaaagtaaagcaaaacgggtagttttttcatctatgtttttgtataggcccctccatgttctgccagttgagtctcccatgtgaccaaagacacgtttgggttttttttttttgtattttgtgttttgacgcggagtttcgctcttgctgcctaggctggtatgcaatgatgcgatctcagctcactgcaacctctgccttctgggttcaagcgattctcctgcctcagactctcaagttgctgggattacaggcacgcgccaccatgcctggctaattttgtatttttagtagagatggggttctccatgttggtcaggctggtcccgaacttctgacctcaggtgatctgcctgccccggcctcccaaagtgctgggattacaggcatgagccaccactcccggccccaaaggcacatttgtaagagggtgagcctgagttaagggcataatcattgaacattggaatgattgagggcatgttatatgtgctttccctatgaccccggcaggtccacctctcagtacccaccctagagaaacacatatgtgcacaaaaaggcatgtgcaagtgtgttggtctcagacttgttggtaataggtacatcaatcgaacatcaataagtctgggacaaacacacttgcacatatatatgagagagaaggagagaaaaaccttaacatctaccaataaggaaatggttatacaccaaatcaatgtattcatgctttagaatataaggctgcaggtaaaaatataagtctagagctgggtttagtggtgcatatcagtagtcccagctatgcaggagcctgaggtaggaagatagcttgagcccaggagttcaaggccagcctgggcaacatagcaagaccctgtctccaagacaaataaacataaatccatctgtatgctcatagacaggactgcatgatatacagagtgtggtaccacttgtgtatccaaacaaaatcctacctaatccatgactgacacagagcccccgggcagaggggccatatccttaccacctctctgtccctgtggcagctctggcctctcaatagctgcttctgaaatagcattggtttcagggaatttatgacttaactgactttgctgttattatgtggattaagaaccaggcccaaagttgattctttcccattgttgaacttggatgacgatgtaattggcaaactgtagcccgtgggccaaattctgtctgttgcctgtttttgtaaataaactcttattggaacacagccacgcccatttgtttatgtattgtctgtggccgctttccatacaacagcaggattgagttgttgcaacagagaccatgtggcctgcagaggctaaaatacttattatctggctctttacagaaaaatttgttgacccttctcctaagcctttcccctagacccgctctctttcttccaacactggcgaaaatggaaaggaattagcccttcctgttgctactgtgttactcagggggtttgggagagctgttgtaaaagctctggactaatgattactttattagaaattaatcaattaagaaaatcactgcattcccttgcctctccaacacacaaatttaagtcctgcagcagaagttctatctaaagcaggtcccctgtggacgttgctgtagaacttctgaaaatgagtacttctcccctccctcccacctccagcagattcggattccctggaggacaaggattccgactgttatctttctgtcctcagggtctagcaggatgctggcacattgcagatgcttagtacatatacagtggataaatacatcagtggaaaatatgaaaaaagagacagccaccttcggcttcttgcttttgggggcagcctatttagagaccatgaataagaaaagaaatgaaggaaatctgtgaacccaaatgaaatgaccagctgtatgaagggccagcaaatggctcatggagctagtggcttcacaggtgaaaagggagtgtctagcctcccttaagcagggctcatgaaggtgggccatgcttcagccacaccaggtcaggcacgtagtccccctcactcaaggacatgtgcttgagtgccttgggctaccaagttgcctttcccagggactgggtggtctcacgtttgccttggcagggatccccgttgggtgcctgacatctgattttttttagatactgtgatagtaaatgcgaggctgccatgaaaaaggagactccagcctgatgggaacgaagggcggacagtgaacacgattctctctcccagagaaagaacctagcaactgggttagcatttccagaaggctttttgtctgattcacaagctaatttcagcagcagagtgattatctagaacaatgtgccacacagagtggatccccgaagagccgagatgttaacttcaggaggaatcacttattcaggcctgcccgaggcatggaaacacgagagcccgccttgggagaagccgcctgcccaggtcggcccgacctgcctcacggggaaattggcttccactttctctttgaacaaggatggagggtgaatggaaggcggggcagcgagggaaggattaaagccccctgtttgttctataatggggatattcatcttgccttgtagaggggggtcttttactggaatgaaaaagtttcccccatacagtatccatcaaaaggtgcccttatgaggcagaaagaaaggaggagggagagaaatcattcagaacaagagtgggagaatgagaagacatgctaaatatctgaaatgagagagcaccgtgagtttggcgagctcgcagggagattacgccaagtggcaggggacgacgaggggctatgtttcagcctgagcctctcggtgggcccggagccggagtccgtccatcaggaacacaagtccccagccgggcagcacagcgaaagctttgggatgctaatggccctttaggaatgctaaatggagcatttctgtcgcaacaaaggggcaaaatgaggggagaaaggaattttagttttgaagtttccttaggggagggctaaacaatagcggttttaatggacagtgtaaaagttttatctgcgttatgaaaaagaggaatagggtacacatgccctcttggcagctccttggttgggttaaatggcgaacagagcgcctcagtagaggctggactggaatttgctgggtttcagcctctctgagcgaagggcaacaatgttgatctgaggactgctgtgtgggtcccatctgatcagagacacttctgcacatcttgctgtattgattcatgcactcattcattcagtccattcattcacttattcattctctccttcattcatgactcatccattcactcactcaaacaacaactggttattgaacacccactgcatccaggcagaatgctaaccgctgcctgcaccactgcaccactggacaatgctgtccagagagggacaggccatctctgctctcaaaaagctgatgttctattggggttgagcagcagaagtaaaagaagtgatgagaactaacatcaggtagtgactggagggcagcatttagacaaggcaccaggtgaggcctatctgaggagggaccatttgacctgagacctgaatgaggagaaggagccaaccctgcggagactgggggtgagaccatttcaggtcaagagaagacgtgaggaggtcctggtgcaggaaggagcttgccacgtttgagcaacagagcaaaggccagtgtggaggaaggtgggaagaggagaggaaggcaggatggataccatcttgatgggcttgatgggaaggcagacatcttttttttaatttttatttttttgagacagggtctcactctgttgcccacactagagtgcggtggggcagtcatggctcactgcagcctcaacctcccaggctcgggtgatcctcctgcctcagtctccagagtagctgggactacaggtgcatgccattatgcctggctaatttttattttttgtttttttgtttttgagaccgagtttcgctcttgttgcccaggctggagtgcaatggcgcaatctgtgctcactgcagcctcaacctcccagactcaggtgatcctcctgcctcagcctctagagaagctgggactacaggtgcacaccattatgcctggctaatttttttttttgacagagtttccctcttgttgcccaggctggagtacaacggcgtgacctctgctcactgcaacctccgcctcccgggttcaagcaattctcctgcctcagcctcccgagtagctgggattacaggcatgtgccaccacacctggctaatttttgtatttttagtagggacgaggtttcaccatgttggtcagactggtctcaaactcctgacctcaagtgatctgcctgccttggcctcccaaagtgttgggattactggtgtgagccactgtgcccggctgagtgccgccatcttgatggttttgatggggagccgccatcttgtgggcacggtgaggagttagatttaattttgaggtctatgggaagccatgagagaattttagataggatggtggtctgtctttctgttagttggtggctaatgggtacaaagcagaagcagggaaggaccctgggctggagagtcctgagttagagaccaccaagtaggtctggctcaacagctctggtcagaccaacagtagctggtcagcctcaggtagagtgtgtggggtgctgagtgatggcctggggtagtttggggccgaggaagggcactcgtgttctatgagcaccgtccagaatgaggccacagcccagctcactggaaacgtgccctggagtgtgatggcctgggtagtgatgtgagcacttaacccaggctctgctcagagtccagaagcaggggctccaccccgtgagatgtggcaatggctttttgaaggaagaactgatggggcgtgggactggtccagcatgaaggatgaaaagacgctggagagatgagatagtaaagacaacgcctttcgtgcctgcgtgcttgctgtgtgccccccgtctcgtcccttcaacagaggcccccctgtgatgttatcagggcaagcgcttttcatccttaggattctttctccatgcaaaatcttatttggaaactcagtgtggaaaacaggcaaaactcgggctgctttggctgaagaaggtgttgttgaggtgggggctggagtgtacccccttctccccctcaccccgcagagccctgtcctcttctttttgccccccacccccacttcaccctcagcatgaccaaaggacccctgtggtccccagggacacagtttctcaagagaggcctgggaccaacatgtacagcattatttttgctcccactgaatttgctgtacaaacaactggcaattggggtatgttggctgaaataatttcatcacttaatcctcaattttacgtgtgactggttgattgcacacagatcctgtgacccctgagtctgtttcctagtgattgcccgggcttatcactatattgtttgctttctgctcttccccggggtttgctttccaggggcagttgtgtgacctgcctgcctcttggtgacctccttttcactctggtgaacactccttcatctccccgttttcattgatttctcgggtattttccattctgtaatactttggctgctgtttcttccttgtttttataaaattcatctgctggttgctgtttacaaaacatctcctttaaaccatcaggcacgaaggcaggattgctgccccactgggaagccggccccacaatcaggttccacgtaaggacgttttccagaaaatgacacgtggctcctttaagtgcaacacttttaatttcatgagaatcgtatttttacaggtccaatattatagacttgtttggccagggaaaaacattgccagttcatttttaaaatttttaaatgtttctcccatcatctatttatttgtttatttttggagacagagtctcgctgtgttgtccaggctggagtgcagtggcacgatctcagctcactgcaacctccgcctcctggattctagcgattctcctgcctcagcctcccgagtagctgggactacaggcacatgccaccatgcctggctaattttttgtatttttagtagagacggggatttgccatgttgcccaggctgatcagaaactcctgagctcaggaaaatatgcctgcctcggcctcccaaggtgctgggattacaggcatgagccactatgttcgtcctatttatttattttttatttcaatagctgttggggtacaagtggtttttggttacatggatgaattctgttgtggtgaattctgagattttagtgcatcatctgaatcatttttgaataacaatctttctgaaatgcatttttgtacttacctgcctttttaaacagagctcaaacatcatctaggcctttcttattgtctcaggtcattcatatgaacattagttagtgcatcctattgaatgccgtgtagggaattatgtacgtttctgtgttctggccctaagtggccccacatggccaagtcttaagacttagcattgtgtgttaaaagcctcacttttcttatccataaagtggggattattataccgaccttgtaggataccttataggatttttgcaaggcttagggtccatgtaagatccttggcccatggtaggcactcaaaaaaaaaaaaaaaaaaaaaaaaaaagaaaagaaaaaagaaaaaaatagcttagagaaaagaatggaaaacagcagtagattcttagaagctagatattttccatcatgaattcttttcctgggtttgaccatttatattttttgagccccaggtaacgggaagcttgcccccgcctagaatttgtctttaaggagttgaagggagccaaacatgagagaggcagacagtagagtggtttaagagcccacaatctggagttagactacctgggttcaaatccagactcggccacttcctggctgtggctctgagcaagttctttaatgtctgtgcatttcagagtcctcctttcaacaatggagataatgatagtacctgtctcagagggctgttaggagcattaaataatttcatacacgtaaagtgcatagaatagcacctggtacacagtaagccctctatattatcattcatggtgatgcctacctgctacgtggccggcacatgctgaatcctgggtttaatatgacggtgactgaggtgtggttcctgcccacaaataaccctggggaaaatgcagcaggtacagatggaggaacttacgcaaatcctcaaaaatctgaacctagaattgcagtgtgacccagcaatgcctctcctaggtatttacactgaaaacaggtatttagaactgaaaacaggtattcagacaactacttgtatatgaatgctcatggcaacattattcacaatagccaaaaggtggaaacaacccacatgtccgtgaacaaatgaatggataaacaaaatatggtctatccaccctacgtaatatcactcagccagaaaagggaatgaagtacaacttatatatgctacagtgtgaaggaaccacagaaacagtatgccaagtgaaagaagccagacacaaaagggcacatatgatatggttacatttatgtgaaatgtccagaagaggcaaagcagattagtgattgccaggggcgggaggaaggggaaatggggagtgactgcctagtaagttatggaatctcctttagggaagatgaaaacattttgaaactagacagaggtgatggttgtacagctttgggaatgtactaaatgccaccggattgtctattttaaatgactcattttatgttttgtgaatttcacctcaattacaaaaaaaaaaaaaaaaaaagacccttgcagatgggaagactcaagagggcaagtctaaaccaccagggccacgtatggctaagtgagcatgtttcggagcactggggcccagggaggggagggtcacagtggcaaaaatggcacctgtcggaagaaactgcacttactgcatacggggtgtatgtatgcaaatgggagtgtacatatctatgcaaaatactagccattatcattagagtaggatacataatgataagcgtacagttggccctcgaacaacacaggcttgaacgttgaggatccatttatacatggattttcttcctcctctgctaccccagagtcagcaagacccacccctcctctcctcctcagcctactccgtgtgaagatgacaaggatgaagacctttatgatgatccacttccacttaatgaacagtaaatatattttctcttccttatggttttcttcataacagtttcttttttctaacatgttttattgtaagaatacagtatctaatacataaaacatatacaatatgtattattaactgtttatgttatccataaggcttccagtcaacagtaggctactatcagttcagtttttgaggagttaaaagttatacgcgggttttttactgtgtggggcattggtgtccctaactcctgtgttgttcagaggtcaactgtgaattttataacagaagataaccagcagttgaggacggccatggtaactgtcaaatgaatggttttaacattgggcttcaggaggtgtgtagcaaacagcacggggactcataatatctgttttgccattagccagctagctctcaagtgggataaaaaggagtaggcagcccgggtgcagtggctcatgcctgtaatcccagcactttgggaggccaaggcaggcagatcacgaggttaagagatcgagaccatcctggccaacatggtgaaacgccatctctactaaaaatacaaaaattaactgggcatggtggcgcgtgcctgtagtccaagctactcgggaggctgaggcaggagaatcacttgaacctgggaggcggaggttgcagtgagccgagattgtaccattgcattccagcctggtgacagagcaagactctgtctcaaaaaaaaaaaaaaaaagtaggcaacaaaggtttaggatgaaggtataatttaaaaagcatgaagttgaaaaaattactcaaccacagtgaccttggttgaatcaccttaggttgtttgctttgcacaggggaaagatcatcatgttcttttgtagtgatagagcattctgatccaaccaacagagccccatggtttctagggaggtggagaaggcctggtggaggaggaaggggagggctcagttcctttctagaacttgagtgtcagttgaaaatagagtgaggaaggtggcagttgaaaatagagtgaggaaggtggctgattctaggcaggtgagtggaatgagtgacagtggcccaaagggtaagggggggtctggcctttctagagaacatgtgtcaatgagacagttggctggaaccttggctcccagtaggagcataggaggagatggagcagagaccgggtatgggcaaggtggtggccaggctaaggaaggtggggtttatctagacaagtggttgtcacattttggcctgcttcagagtcacagattgctgggcccttcctcaaagataggtttggagtggggccctaggatttgatatctaacaagtgcccaggtggtgttgatattgctagtctgtccacatttggagaaccactggtaagcgatgggcatccaggagcagtttttttgttgttgttgttgtttttgttttattttgttttgttttgtttttttgagacggattctcgctctgtcgcccagaccagagtccagtggcgtggtcttggctcactgaaacctccacctcccgggttcaagcaattctcctgcctcagcctcccaagtggctgggattacaggtgcctgccaccacgctgagctaattttttgtatttttagtaaagacggtgtttcaccatgttggccaggctggtcttgaactcctgacctcgtgatgcgcctgcctcggtctcccaaagtgctgggattacaggtgtgagccaccacagccagccaggagcagtttttagcaggggacaagcctgatgaaatggcgtaaacgatggccactggatatggctgtgagagcaatcactcattaaatcaggtggttttgttcctgaatcaatcttgcatctcagtagatttttagtccccgaggctcagactgccaacaaaaaatctttcagggcattgtaatattttgatgaccacagacttccttggaatgaagttgtcccaattccgaatgaggggccacggcctcataaaaggtttttattcccctttctgggctggagaagccatctaggaaaatgctgtttctgtacctaaagtgttgggattttcagattgttttcatgagttacagacacacggagcagcatgcttgaacttagaccctttctgcaaatgtcaggctgtatgataattgagccagaatgttactcgagctttctgacacattttttgagacctcccatccagtattctcatacagaaatatggctcctccaggtgtgcacttaacactcgcttctttgcagccaggggaacctttagctaaggaaaaaaaagccctcctacccttggtttcaaaaggttttgaaatgctaattcacaaccatgaagtattctgacagcctggaatgttattcagggcaatcaggcaccttgattattacagaagtgtgaaaggtaaattgctgctacccaagaagtcacccagcttttcaagagaaagctcagaaaaatagcacataaaattatgttcggggattacacttcatgtatcgtgtgatggggtgctctgacacccagcgtgtctgtaggtgtcacaacgtcagctcgtagtagaaatgtaacagcatttgccagcgtcgcccttaagtaaaaaaaaataataataatacaggattgtgggaaacattttcagaatgtgttgtatgcctatctaaaatctgaaagtacatcttttttgagcttctgcttttcctattttccactgagaaatcctgtcccagagatgagactatcttttctttttcttttttccaaagggaaagactattttttatttatcctatagtcttttataggtattatcattaatgactttttttttttttgacggagttttgctcttgttgcctaggctggagtgcagtggcacaatcttggctcactgcaacctccacctcccgggttcaagtgattatcctgcctcagcctcctgagtagctgggattacaggtactggccaccatgctcagctaattttttgtatttttagtagagacagggtttcatcatgttggccaggctggtctcgaactcctggcctcagggaatccacccacctcggcctcccaaagtgcagggattacaggcgtgagccaccgctcccagcccattaatgacttttaaagctttgttgtattttgccacaataagcacaaaatggtgtttctccatggtccaaactcaaagtcaggattcagtccataatccaaaagttccacattgagctatgaaagaggtaagtgcaggtggttagcagagcaaagtttttttttttttggtgacagagtcttgctgtctcccaggccggagtgcagtggcgcaatctcagctcactgcaagctctgcctcccgggttcatgccattctcctgcctcagcctcccgagtagctgggactgcaggtgcccgccacc[138 bp omitted]attttttttttagccaaggcagatgcatgccttgaggaaggagctgttgtcactaccaactgctcatgagaatgagggaaacccatctcattcgcttttccttactgggttttccagtatgatttatttattttttcaattactaagtaagaaatacaagcatcctaactgtaatggtcccttttttttactatagcttcttcaaggtctggtgggtagttgtagtttattgctctccttggaggaacaggaaaggggttatattgtttgtaggtaagtggaaaccaaacattccatggggaggaaagtgaatagttgtttagggtcgtttgtatgtaaatccttgcatccattcattcatcggtccatgctctatccatgcttccatccatccacccacttcctggccagccttctcctctaactgacttccacatccaggagctcgccccagggttctcccttccctgtacacattctctctgtaaatgaccgctgccattttcatggctttccataaagtgatgccaagcctctctgttttacctctctggccctgacttctcttttgagcttcagaccccacagctccccatttctcacttctgcgtcgatgcctcatgggcacctcaagctgctcaggccagatacctaggagggttgttccaaatccctctttttctttcactcccccatccccaatcagttcctccctgagtctgatgagtaccatcccctactcggtgtatttcatgtcatcctgcacactgtcatcattcacacatcgttcatagtgtatttcatgacatcattcacatcattcacactgccgagtcaccatccccctggatggctctggtagttccttccttggtttcctgcttccactagctcctcagtttgatccatttccacacaacagcagtgtgatctctttttttttgagacagggtcttgctttgttactcaggcaggagtgctgatcacagctcactgcagccttgacctcgcaggctcaagcaatcctcccacctcagctgcccaagtagctggcactacaggtgtgcaccaccatgccccattcattttatttttattaattaatttatttattgagatggcgcctctctctgtcgcccaggctggagtgcagtggtgcaatctcggctcactgcaacctccacttcccgggttcaaacaattctcctgcctcagcctcctgagtatttgggattacaggtgtgcaccaccacaaccggctaatttttgtatttttagtagagacagtgttttactatgttgaccaggctggtctcgaactcctgacctcaggtgatctgcctgcctccacctcctgaagtgctgggattacaggtgtgagccactgtgcccagccttatgtgatcttgttaaaaagcaatacccttgctataaacccagagtggctccgtcggacggtggcacagattccttccctgccagtctgaccccagcctgcctctcctggtttcctgcccacactgtggccacattgcccacctgttcttcccactcttctgtctgctcttggctggttctttctcatccctcaggtttgggctcaaattgccttgctgagacaggcttttcctgacacccggtctgaagcactgaccccacacacccatatggccacagtctcttgctttcacaatctgaaatgatctcgtacttgtccactcactgaatgcctgtctcctgacattgaactgtgaacgccaccagggcaagcaccaagtctgctttgcgatgccgtgccccagcctccagaccaggcctgggtatagcccgtgagctcagtaaaacggcagtggatgaaggaaggcatgaatgaccccaagcaggatcctgtgctgggctctgtggcctctcagattgtggactatgctcaagtgttagggaagtatgtagaaacttaatcactttaccatctactgatccaagaaaagaaggaaagcttaatttaaataaattattatcattaacagagttgaccataaaatgaacaaaaccctcatttatcattttgctaatcctggcttccccactagaatatctacctttagccagagattaaatccattcatatgtgtccggagaaaatataaaacatatatacaataaatatgtgtagaggaaagcagtaggatggacactgcaatgtaattgtattaataagacattaaaaatatagttaaatgcaattatgtatattattgtccggtcaagaagatcactagttgtattaaagatgtcataagcctgggcatgatggtgtgcacctgtaatcccagctactcaggaagctgaggcaggaggatcacttgagctgaggagtttgagtccagcctgagcaacatagcaggacttcgtctccaaaaaataaaaataaaaaagatatcataaagacatcataagcttccattggttacttttagtatggatcaagtagaaaattcaatagcagagccgggcgtggtggctcacacctgtaatcccagcactttgggaggctgaggtgggcggatcacaaggtcaggagtctgagaccagcctggccaatatggtgaaaccctgtctctactaaaaatacaaaaaattagccaggtgtggtggtgggtacctgtaatcccagctactcaggaggctgaggcaggagaatcgcttgaatcttgggggcagaggttgcagtgagctgagattgtgccactgcactccagcctgggcgacagagtgagtctccgtctcaaagaaaaaaaaattcaatagcagatatacagaatggtagaacttaaccatggatcatgttagtaagcaatattacaaatggcacgttgtggccagttgcagtggttcacgcctttaatcccagcactttgggaggccaaggcaggcagatcacctgaggtcaggagttccagaccagcctggccaaaatggtgaaaccccgtctcaactaaaaataacaaaaattaactgggcatgttggcacatgcctgcaatcccagctacttgggaggctgaggcaggaggatcacttgaacccaggaggtggaggttgcagtgagccgagactgcaccattgcactccagcctgggcgacagagtgactccatctcaaaaaaaaaaaaaaaaaggcacattgagccggagtcggcactttgggaggccgaggtgggcggatcacatgaggctgggccaacatggcaagaccccgtctctgtaaaaaatacaaaaattagccaggcatggtggtgcacacctgtagtctcagctacctgggaggctgaggcatgagaattgcttgaacccaggaggcggaggttgcagtgagccaagattgtgccactgtactccagcctgggcgacagagcaagaccctgtctcaaaaaaaaaaaaaaatggcatgttgttagggatgtggacatgataatgtctcctaaggctattaaatacagcttcaagtgtggaagttgagtatgaagcaggggtatgtgttctgggtgagccatagaagataataaatgttttggatctctgtttctttgagcctcctgttacaataagataacagttttcactgtattaaatacatttgtcagtggaataaggtccatttgacttaaatgcacccgggatacattaatttacacagccattcacacagccaccagagctgccttcctttatgactccattctccactcctgtctcttacagaattaagtccaaactcctttacgtggaatttgaggcccttcttggtctgtcccaacccactcatcttcctcacttcttcagtcgcctcccatgccccatcgtgtttatgctgtgcaagcatcttcaggcctggatcgggagttagttcttccaggcatctctgcccatctagcccctcaacaggtgactcagggtgagggctctgggcttgggggatgggagctaggtccatccctcggcagccaggaggccctgggctcaggtgctagaagcctctggtgcaaactcacacattagcctctgcctccatagagttcagattgtattgaagatatcataaaccgggcatgctggtgtgcgcctgtaaacccagccgaggtgggaggattgcttgagctgaggagtttgagtccagcctgagcaacatagagcagtctccaagcacggtgccttagggcctcccagaatgtctaactcagggcagacaatcaataaatgttcattggatgaatgaataaactaccaggctagaagggattgatgagtttagggaaacgtctgtttggtgtgactggaatcagattatgttcttttttttctgagacagagtcttgctttgtcacccaggttggagtacagtggtgcgatcacagctcactgcagccttgacctcccaggcttaagtgatcctccctcctcagcctcctgaggagctagaaccaaaggcatgtgcaccacagctggctaatttttaaaacaaatttttgtagagacgaggtcctactatgttgcccagactggtctcgaactcctaggctcaagggatcctcctgcattggccccccaaagcgctgggattacaggtgtgagctgctgcacctggccagattatgtgtgtgtgtgtatgtgtgaatttttttttttttttgagatggagtttctctcgttgcccaggctggagtgcaatggtgcgatctcggctcaccacaacctctgccctctgggttcaagcgattctcttacctcagcctcccgagtagctgggattacaggcatgtgccaccacacccagctaattttgtatttttagtagagacgaggtttct[132 bp omitted]gttagacccttgggagggaacagtgtgtcatcctcgaatttccaaaaggggctctaagatgcaggaaagagagtggctggtggctggtgtccacaccatatggcggcagtacagactgacccacggctctcttcccagctggtgccttgcactcagcatgcatccacccctccatgagtacaggaatcagctcatctgctcttcaaagtatggagctgaattttcctatccttgcaaatagcctcttgcctcctagcctggcttcctccaccgttcatcaagacttcagtaccaggagcactgtattgatgaatttcacaatcccgtggggataaaagctgctaaaacacttttcccaactgctaaattggaaccttttagacaccgagatctcacttcccctcctaggaattttcctattaaaacattttaaaggtctattcaactagtttatagctatgggaattaaaaaaaaaagaatggaaattaagttctagggacatgtctttttggtcttctttaagaatcagtctaatttccacttcattggctttttgttatttcaaagcagaagaatgaacattttctcatttcgtatttcgtaatgaggaaaccttagcagaacctgtatataaactattttggtttgactatggattaatcactttcactgcgttaaaaacaaaataatgaagccaaggaggttatttccttttcaagaggaggttgaattttctgagcagctttctccctcaaacttctcagagtcttcaccttggaggcctcgccctgcctgcttcttgggactctgcttcttgtcaccaactgggatttggggacagaaggaccagtaggtgggagcacctcaaagtaaggagtgtgaagtgcctgaggacaaggtggcaggggcttccagttcctccttaggataaggctagtgaggttgaccccgcattaacaacacatttaaaggtttcatctcctatttgtgatcttgatgtattctacctttgcccacttggtgagggtaccaagaccccgtgtcacagcacaggccaaatgaaccacctgtggctcatcctcctgggaagagtttggtgggtaacccagataccagtgggtagccttcgggagaaaagggtgagctagtctggtaatgttccccagcacgtggctggggatggtcctggctggagcacatacccgccttcttcttcgtaggttgtgtagactagtggactaagaggttggaccctgtaccacactgagtgggttcaaactctagttctaccacatatcaactctgtgaccttgggcaaatgtcttaggtgcactgtgactcagtttctctttctgtctattattattgccctcttcgtgtgattgttgttaaatgagttaattcaggggcttagaacagtgtttggttcaaagcaagtgctcagtaaatgtcagccatgagccttccgggtggatctcacttcagccactggttaggacaactcagaaaatgtcatgcgtgcttctttctcccgagaaaggaaattgttttactcttgtccaaactgtcttcactatttagaggtcatagaggaacaagaagtgactgagagcagtcatggctctttgagcctaaacccccgagactttggaaaagtgaagtgtgatgaaaagatggaattaggaccttagtctcctgccctacttgtcgggtgctgttgccactcatctaagctgccactggtttggagctcacatttttattttttttgagacaaagtctcattcttgtctgccaggctggagtgcaatgttgcgatctctgctcactgcaacctccgcctcccgggttcaaatgattctcctgcctcagcctcctgagtagctgggattacaggcacctgccaccatgccaggctaatttttgtatttttagtagagatggggtttcaccatgttggccaggctggtctcgaattcctgacctcaggtgatctgcccgcctccgcctcccaaagtgctgggattacaggcatgagccaccgcacccggtcctggagctcacttttaagctacatgtgctttgtggagcaaagtcatcatttggtaggggctggacccatagttcggtcttcccaagacttttggggactgtttcagaccattcccatgctgcgtgtccgccacgttgcttccacagagcctctctgtggtccatggctcttcccattgcccgcagacctcacttcctccaacttcttggaactttccagattgagagaataaccacaaaccactgaggccggagcactgaagagtccagctctttttcacctctgtcagcggtcatgagggagcctgctctctgtggggacagatctatttttggtgtaacacggatcgtgtgaacactgataacctcagacagagtgattttcttccatgtttctcaagcatttaaagggaagcctctggaaccaccgtgttaagctcctgacacggtccacagcttgctctaagcctgttttgatcacttttctaatacaatgatatcgtttcacattctcagtaattagactctgtaatccctccattctactctgtgtgacctttatcttaaatgacatttttaaaatatgaagtttaaaaattaaaaaaaaaaaccataaaacaatgtttgcaaaaaatgtactaaaatgaattatagtttctaagccctaggctgtcatgcctggtggaagccaaaggacttggctcagacccacccctggggccagtcctacagctgcaggtaagttatgcccacctgcctgcccatgggcgggagaccctgcccgcatgccctttcgccagcagcatcaaatggaggctgggggtgatgagcttgtcaagtggtggccgatgacacttgtattgttttccctacaccttggaaagtgactcaaatggcaaacatatgtctccaaagtcatgcccagggtttctttccctccagaattcctaaagacactctgagtcccagcttgcagtatgaatggaggctggggtctgaccaggtgatgggggtgtgagaagttgccttatatggtggcccctacatttcacagcccctggcagatgctgcagtttccacatccctggggaggggtgagagatgctgtagatgcctttgtgggatctgagcacacacgcagccccgagagtcgggagggaagccggggctgggagtaggatctctgccctttgcacagctgaggtctggcaagatgcttctcgggcaggaaccccaaggggagcactttctccacgtgatccatcatttcctgggggtcttcatgagtccttagccccagctttccagcttcacaccagccccctcccgggtggccctggagcctgggttatttgctgtttttttttttttttttcaagcgggcaccacacccgtggactgtctgccaagaaggaccattgttcgtgagaattcctccctggctccagctaacccttagatgcactattctgattttgtgggcttgaattcttattttcttaagcctcacttctacccctaccccccaacttattcttgccttctctcaacccggccttctcatcaaacctcattttgttgcccaaaaagctttgagaggtgggcggggatgtggaggtgaagcccttcaggaaaattgaaggtggctgtttgacctggtctccggagtagctttgcgtgcccgcctcggagaggaggcagggaggccccctgcattctgggagaggaggctgtcgggtaacctaagttggggaatgcagcggtgatgggaagtgagtgggaggcaggggtgggaataagcgggaggagaagataggctaaagaatgaaaagcaatatctctccccccagaattgagttgattaacctgtagaaagggaggccctgccaagcccaacttccttgtttccagaaaccttggcacggaggccccgtttctggcagaggcctctcctagtcggggaaccagcaaagcagctgctgtgattttctttttcctctcatttctggcaatccggaatgggactgtttacttttttcttcctctttccttccccaccctcctgtagcagggagttggttctggttaatgttgaagatcataacatgattaccccaaagtctcctgaaattaaatcacttttcttcaaagagaaaggggtggggggaccgtctggctggtaggccagcgaggacgagcggatattgaaagcagcctggcagctgtgattcactttgcacagcggaggcccggcaaggcccaagcagccatgcacaggggccgcatttgcaaacagtggctgggaggagtcgcgtatcccacctgggccccagacacctgtctcctgagcgccgagacttgggggtggaaggtgggaatcaaagccgcgggtgaaggtgggtgcaaggtgattcagagagttgaacctgaacatgagtcatctgggaagaaactgaacttatcaaacaagtccccacgagagttctccatcacctcccaccctgggagttcattgagtcagggcacaaatttcagggcaactttgccaccagaatagcctgggatggaaatccgtcttcaaagcctaacttcagtggtagctggagggatgtttgtttgtgtctttccttgtgctgggtcttcctgaactcatttgattttagaggttgagaggaccatagagatcctccagcatctgccctcccgccgagtgcaggagtctcctgtatacttgaccccagcaaataatgctcagcctctgcttccttccctccagggcaaacatttgccctcttacaaggtcagtttttgaagagagaatatgggaattgcacctgttgatccaggttgtgcgttccagagacttggagatccatggtcccacttggtgggtgcctggctcggaaaatgacacaaagtgaatgtggtattctcttcgtcatgggcagcctgttggggattcttggccctctttcgcgcagtgagttcagcactccctctttgtggctgttttcctgggctgtttcctaccgtttttcattcaagggaatcagaggagtgggaaaccatgtggaagcaggatctggaagatgctcgattcttgttgctggtgtcccggtaccttgagctctttgtttggggccagtgaccagcctgggaggcccaggaatcagtggctatgttgagtgaagactttaggggattggtcttttggcgccaagagggcaccagttaggcagcagagggaccatttgagagaaggcagtggtgccggctctcgcgaaccagtgcgggagggaagcctgacaggggcgaggtggcttcctgcaagacggcgtgtaagctcagcaactgcatttttctgaggaattagggatgggacgcggccagcccgctctggttggagcttggtgctgtgactcattctcatcaagggtcactgagcgtctctctgcgcgtggccttgggctgaactcctcacctggccagccttctcgaaaatgtgtgtcattccttgtgaggcagagccatggagcgggtgagtgagtgtgcaaatcagtggaaattcatctgcaccactggaaaaacaactccaagttcatgacttgttggcttcagaggcgtgactgtgaagaatggagctgacatttttgtttttcactcaacacgcccaagtagacagatccagatgactctcctgtccactttaggagccacctggggaggtgaaacacttcttccactggcctggagggcccttttaccagccccgtggggaagtcagtcttgttactttacggcctcagtttttatccaaagacaacatcacctaggcatgatcactgagcctgttcaccagatttgacacccaagggttgaggctggatgcaaaagtcctatgcaggtccaggggctgaggagctgccactatctgggaaattcaggagtccccaagggcaattctcaaaggcaagtctcaggaatgtgttgggcccattggaatactgttggaataagtgagccgtcctcactctgcgtttcccaacacacacgggtcttacccaacgggatgtgtgcatgtgagtgtggatgtggaatatgctagcttgttagaaagtcagcctcaacatgttgtggtcgggcctagttggtttgtttaccaagtctctttgagaggcacagtgagtaacagcagggtctctggagccaggctaccagagttcaaatcccaggcccaccacttagagatgggatagtcttggtcaaa[151 bp omitted]tgtctctagtaaaaatacaaaaaattagctgggcatggcggtgggcacctgtaatcccagctactcaggaggctgaggcaggagaatcgcttgaacctggaaggtggaggttgtagtgagccaagatcacgccactgcactccagctgggtgacagagggagactccatctcaaacaaaaacaaaaacaaaacaaacaaacaaaaaataaataaaaaaaacttaaataaaacggggctctatgagagtcccatctggttggtattaggatgagttggccttggtgtgtcacaggaatgaaaggggacggcctgtcagcctctccaagctcatcgtcattgcccctcctagcttctttgggagggggaagctttgagaccctcagggacttcagtcctatggcctcagactagggatgtgtgtgtggctctgcagcccccggaggtgtggccttgtgccagtcccagcgctgcagggaagaggcaggacagaagtgaggggaagacatgtttccccagggggaaaataccccgcctggaatgggtcagtggttggcaaactttcatttagctgacagaatcctccatggaatctaatgagatagagcagaagaaagcagagttgcctgggttgacgttagggaggccccatgggctggcccacccctcaaccccaggttcacccttgaggtgaggccactgaatcctggggctccttgaggtcatttttaaaaactgctggtcagagagaggaggtgattccccatggtccctcagctgactgtgctcatgagagctgatttgagaacctgacccctgtggaagacgcacaaccctactgtgtgccctttaagcctcatgacagccactacctttgttaacatgagggaggcccaatgtccaagtgcagtggaatccacccaggtggggagggtctgcagagtcctccatcctccatccacaccagcctgcacactgaccacagctgggaatttcttaaaggcagagggatgggaatgcctggacatgtcccctttaggttctctatttgttttattttatttctatttttaagtttttttgttagagacggtctcaccctgtcatccaggctggagtgcagtggtgcaatcatagctcactacagctgtgagctcctggggtcaagcaatcctcccacctcagcatcccgagtagctgggaccacaggcacacaccagcatgctcagtgaatttttcaaatttttttgtggagataggggtctctctatgttgctcaggctggacttgaactcctgggctcaagtgatcttctcacctcagtctcccaaagtgctgggattataggcatgagccattgcgcccggcctaggttccctactttagattagctcacagtttctcagccttcagcatgtctaacaattagaattcaacatgaatacataaaaccacacactttgcataattattgatttaagtgactttccagggtattttgacagtcagttatttttaactcctgtgtgactttatcaaccacatgcctccacccaggatggggtgtccctgaggactcagcccctgcctcctggctccacactgtcagaggtgtcttcttgctagacgggttcccctgcagttattctaggaagcccagtgtagacccagctgctgcctggccctctccttcctggaaatgtttcccaccccgttctgtagcaggtaatcatcagacaggtgggtgagcagaagattggctgtggtctcatgtcttctgtttggggcatcttggaattaacaaagcaggagacagaggaaagaactgataacagttggaggtacaatgtctctaaaacatggatgtccagccccaattctccagttgggaatggaaaggttcaaaagaaaaaaaaaggaagaaaggaacaaaaagaaatggaagtagtgatgtagattttggccaggaagaggaacagggtttggggctacatgttgtttgaggaacggccccaggagaacagaagttcagataaatcagaggtgagagggaaggcatccagaggcaacaggatattggaggtggggcagtggctgagaatcaaaagccttggctaccaatccaggccatataccatcagctcattttagcactctgaaccattcatgtcgcttttctgagcctcagtatcctcacctataaaatggagataatagtccccaattcccttacaaggtagttgtgaagaccaaatcagctaaggcaaagaggacatgctttaagtgctatatgaataataataacaacaaataaagtacacttctgttagaaacaaagtgggaaaagttgataaagatgaactttactgctaataaaatatccaggaaaattggaaaggtgatggagaggtcattggaagaaacttcagacaaaagaaatgtataaaccacccatttctctagtcttaaacgggtctccacaacttcagccatgcaggagagttaagaatccctctaagcggatgaggcaggaccggtgttcaatgaatgtctgttggtcatcagtatttgtggaggcttatgggggtcctgggctctgtgtggggattgtggaggtcatcccaaggaagatgtttgccttaacaggtttaattatcattactccactcctgtgttcccattcccagatggtggttaagcactccttgtcaccactcagtattgtttgttaatttgcctgcccatccatctatccatccatccatccatccatccatccatccatccatccacccagtgaactaagatttactgagccttgttctgcatcaggcagtgtgcttggtgatgggagagtggtgagcagaagaatggcgatcccttgctttcatgaggctctcacagtccagtctagagttagacaggtaagtatcataagctgtgattaagcaatggggaggcacaggttgctatccaataccaggcagcagttccctgggtgggggcagtgggatcgttaggaacaacttctggaaggaaggacagggaggagttagccagatgaaagggggccagagagaaaatggacatggcacaaaggctggtacatctgggagcaggtgagggatggagcgtgagcatcctgtcccccggaatctctggctcccgactgcattttaaagatgagtacctgagagtctgcatgaattctggcagaaatagcttcagccttaccacatttcagggtagcttctgttcttagatcttctttatggctgaggttttatgttccagaacatgacttgctcagtgtcttttctagaaggagtcaaccagggtacctgggcctaacctctgggcaacctgcaatggcaaataagatagaaaagtgagactctgtgggcttctgggatagagaaaccatccctggaatgtccccaaggaaaacttgatctctggagtcacccctctgaacttctcaaacaagtattagtgagtcaggcagacaaaaagtcttcctggagctgatattctggagaaatgatgcggtttgctccaggagacagagttcagccccctttctacgcttctcttttactttgaacccattctttgaagaacatagaagctgatttaggaactctggagtgcatacatctggaaagaaatagaacatccagggatgcccccatggcttctacaatcctaatggctcctcagcctctccctctactccacatccagccttgggttctgggggagaagacccatgggcaggaagagggcctgagatggcaaagaagcagaagcttgatagtacagggccccagatcttttgtgcagcccagagctgaggttgtgatggaaggaccccttctgtagaccccctgttgctgtgccaagggagtagaaccctgctccagggtggtggggtcaccattcttgcggggtaggagatacccagggggtgagctgcagcaacttgtgcataatctcttgtgcattctggaaggtttttcaatgtctgaaacacttcctcctcagctttggacttttttctagtccccttaaaaatgtgtctgtacaatgggataggctggggagcttatcttctcctccccatctgtattgatggctttgattgtgagcagtgtctcttttttccttaacactattctttcctctagcaccccttctagctggtccccacccctgaggaagtgtttccccagcggacctattttctggcccttgaggaagtggttccccagaggaagtggtagcccagtgggtctagttcctggcctcccaggaagtggttccccagcaggcctgtttcctggccttggaggaagtggttccccagtggacctgtttcctggttccccctgggaagtggttcctcagcgggcctgtttcctggccctggaggaagtggttccccagtggacctgtttcctggttccccctggtaagtggttcctcagcaggcctgtttcctggccctggaggaagtggttccccaatgggcctgtttcctggcccccaaggaggtggttccccctgggaagtggttcctcagcaggcttgtttactggcccctaaggaagtggttccccagtggcctgtttcctgaccaccaaggaagtggttccccagcaggcctgtttcctggcccccgaggaagtggttcccatgaggacgtgtttccccagcaggcctgtttcctggccctggaggaactggttcccctgaggaagtggttccccagtgggcctgtttcctggctccctgaggaagtgattctctagcaggcctgtttccaggctccttgcagtctccccagtgtcttcagcacatcgttgaaatttgtaactgaggtgaccaatgaccttcgtagctaaatgcagccccctgcgtgacctctgaagcactgcacacatggacctctctatcccctctggaattctctcctcattgctgctcaggcctcgtctgtctccctccttgactggtcctccttgctgccttccctggagccctctacacttcaggtctcaccgatcccattcactgttagagttaagaggtggatggttccagttatccatctctgttccagtctctctagaagcatccagtagtgttatctctaacttagaacatttgaaatctcattgtaatattgcgaaatgtatatttggtcttggtccctgtttcttggcatacaactcctaaaatccttggaatcttcaaagggatcagatgtcttttgtgtgctaaggattggttggtggctggcagcctccaggtagcttcaggatggaggatggttaccagaaagaccatggcagggtgagagggcttggactttccctctccctgccccacctccggtgaagcaagaggggttgaaggttgaaggttgggctgatcacccgtggccaatgatttaatcagtcatgcctgtgtaatgaagcctccataaaaactcagaaggacagcgtttggagagcttctgatagctgatcatgtggaggttcctagagggtgatggtcccagggagggcatggaagctcctcgcccttcccacatgtctcaccctatgtatctcttcacctgtattctctgtaatatcctttataattaaccggcaaatgtgtttccctgagccactctagcaaattaactgaacctgaggaggggctctagggaaccttgacttatagctggttggtcagaagcacaagtaaaacaacgtggggcttgtgattggcatcagaagtgctgggggcagtcttatgcgactgagccctcaacagatgggatttgacactatatccagatacatagtgtcagaattaaattggaggacacccagctggtgtccattgcacaattgtttgcttggttgttggagaaaaaaattccctcacacttcttggtgaccagaggtattgattgttgtggggtgagtgtgaggagaagctgttttttgtacagactcatcttaatgactgaaacgtacttcctctgtggttatctctgtgccaatgaagatcacccaggagcccatcttaatctttgacgtctcaaccagtcacctaatcttgttgattttccccatgtgatgttccatttgcacctgtttcattccatttatcaccaacacccaagctctgttcacatggagaccttcatacccacccagatagtctcctcacctctcgtcctccacccccaaacccacctgccccacccgtccacacatcctgccatgaagtactacctttcatcacaacaggttaacgaggaagccgactgctgtcgcagagagagctctggcctcaggtgggcctttctcaatatcttcactcccgggaagaggagattgatgacagtcccttgcagatatgaatggcaggaggctgggggtcaggggtgggatagccatagaggaagcactttcatgccttaaggttgccttcaaccttaagttaatagttggctgcacattgaagaaagtcagataaatatttaaaaattcacttttaaccttacataaggcctggaagagcacttccatttgccaacttgctgcagggccaagacgttttctccgagtttgggtctgctgggtgggttctgtgttgtctcttgcacaaaccttgtctccagtctgcagttggtttcatgaaagtggtgtgattcctcagacaagcctgaagttatctgggttcaaaatcttgtttttttgtttgtttgtttttgagactgagtcttgctctgtcccccaggctggagtacagtggtgtgatcttggctcactgcaacctctgcctcctgggttcaagagattctcctgtctcagcctcctgagtaactgggattagaggcacccaccaccacatccggctaattttttgtatttttaatagagacggggttttgccacgttggctaggctggtctcaaactcctgacctcaggtgatcctcccgcctcagcctcccaaagtgctgggattacaggcatgagcctccacgcctggccagcatcttgtatttttaaaaataattttgcctcaatcttttctggatatctcctctacacctcatttgacagctgcattttgtaaatgtagtgactggttttgttgagtctttgcagttgagttttcatagaaacaaccacacttttcacactgttttaaatgggctgagaacatacacaactggctggtgagggcagctgcgctcaggcatgaggcagagtgtggggccgtgagcagcgcacacacactgcctgctgcagacgccgggccgggggcttcacagagaggataggaggtctgcgttactctacgagtgcatagagtagagattggccatgagagtttctcgccttttttttttttttaattttggatgacagaatcagtttatgaaatgatcttgattggctaagatgatggaaccaaccaaatcagatgaaacatcgggaggataaatctgaagtcttccttaggtctaaagaatgaattgcaccattaccatgtcatagatacttatattatcagtgagactcaagggttttagctgaggggaggatttatttgagtcaaccatggatgtggttgccaaaggaagctaacgtaagcttcgatcatcatagctctctagtgtctagagacaggaggttgtaggggacactgaccatctcctcaatacccttcccacccctcattctccgtgttctgccattggccttggggggattgtccgtgggttttttttttcttcttcttctgagatcaagtcttgctctgttgcccaggctagagtgcagtggcttgagctcagctcactgcaagctccgcctcccaggtttaagtgattctcctgcctcagcctcctgagtagctgggattacaggcatgcgccaccacacctggctaatttttgaatttttagaggaagggtttcaccatgttggccaggctggtctcgaactcctgacctcaggtgattggcctgcctcagcctcccacagtgctggggttatgggcgtgagccactacacccagctgattgtctgtggttttgtaatccagtcaggatgattccatgctccttgccacgtgattgatcaatacacagcattttcctggctacaggaattggttcaggaatggtcatgtgacctggtttggtctaatgaagcatgaagggacattggctgaaggcttttgtaaataaggtacctagctcttctgtgggggattctggaaactagccttcttgctcaccttggatgctgtggtgtgtggatacgaagcctggaactgctgcatcccctttgctatcacagggaacacccaccaaaggatgatattgagaccacgaaggcatagaggacatagaaggacaggtagaagacactaagtcctggatcacatccctgaatgaacccggttctacctccggaccttcagttacacaaacccatgtaattcaagccattttgggtcgagttttctgttagttagcacagagatgagtcttcgcttccttggggagagacagatatgcttagaatattgcatttgcttctgggctctggcctttgagaggcacattgaggaggtgcagagtggctaatgagagccaccgggctggggaaggggattgaaaaagcgtctatcatgggggtgatgatccacttttgggtgtagatcatgttagcattcttttagatggaaagcttccgaaatatatttccaaaaggatacagtttgtagaaatgcagaattgttaacttttcagaagcacgtgtagttgcccaggctggagtgcagtggcttgatctaagctcactgcaagctccgcctcccgggtttaagtgattctcctgcctcagcctcctgagtagctgggattacaggcatgtgccaccacgcctgcatgagataagatattcctgtggctttcactaacatgctggggatagccagagaaaaattccatgaacgtgcaggatgatttaaataaaaagaggctgctttgtctagtcattgtgtgggagggaaacccaaaccccaaagtgtcctcattccagtgtagaaacagccactagagtgttgttttcacaggacgctgtcaccgggtggccctttgggaagtgtgggtgactcgttgcagagatttccatctggggggcaacaccgtaagccctggttccttttccctgctccactccagagcattggtggaaggagacctctggacattccacagccttcctgtgggcctcttcagctttggctttgttctttgcagttttttttttttttttttttttttgagatggagtctcactctgttgcccaggctggagtgcagtggcgtgatctcggctcactgcaacctccgcctcctgggttcaagtgattctcctgcctcaccctcccaaggagctgggactataggcacccgccac[137 bp omitted]cctgaccccgttctttgcagtttctaacacttttttctgatacttgcagcaatgagagtagagccagcagcttcatgcacttgtaccaggatgctacagaaatgagcaaaagaagtgagctgtgtgacttgggcaaggacctcctggttagctgtaggctcatttacagagacctcagaacacactggctcaagcgaggtggatacctctttccctcacttcgtggctgggtggtggggatgcgtggggtaagtaggcagtgctgtcccatgattgtcatccagagcagaacccagccccctgtccagctgctctgccaccctctggggggctatcctcagcttcccgatggaagctggtcctccagcaccctgtcttcattccagcctgctggaagagggaaagaggaaggggagggagagcaatttcctttaaggaagtgaagtggaagttacgcgtgtcatttccactcatattccatcgcctcagacttcatcatgtggccacacctggctgcaaggtatcctgggaagtatggtctctcgctgggtgaccatgcgtcccttaactaaaaggaagtggaggatggatattggcaacagttagcttctctgctactgtgcctcagttcttgcatctacagatcaacgtccacaggatcaccaaccatcccgggagctctagcctcagtgacttcgtctgtgaagtggaaataacaaaaataccaacctcagtgacacacaagagaggactttgcatggggcccacacacagttgggtactcaaatgacagctgctcttatggccgttttcattcagccaatcagcgaataggttttgagcacctgctatgtgccaggagcattcaaggcgctggggattcagcagagatcaaaccagaccaaagctccagttctcggagctcagcttctcgtggggtgacagaggggcgcacgtggggagaactgtctcctctcctcttgcctggctctcactgctactacacatgggatttccaagtcagggctctttgcaggaattgcccagatggtctcttgcaggaagccagagagcctaagtgagattcgtttctgccccaattgataatttatgaaagcaacttcataaacaccaggtagtgtcccatttgttactcatttaagattattatttcctccattctttttatgaggggttttcttgttgattgtagcaagtggaagtaggtgtagggagataagttgttatggtgtcttcaaaaataaaaactaacaaataagccgagtgcagtggtccttgcctgttgtcccagctgctggggagcctgaggcaggaggattacttgagcccaggagttcgagtccagcagtttgggtaacatagtgagaccctcatctctaaaaataaaaataaaacaaacaaacattgagatcattcggtgggtatttctgaagcctctgtctcatgctagtttgaatgctaaatgattgaaatacagtggagagaaccatagggttcctgacctcaaggcactcactctagaggggaatgtacaccagcaattacaatacagggctgtgagaggttagaacgggtgctatggaagcaggaggaagaggtaccagagccacttgcggggcaggatcagggaacgcttcctggaggaaatgaaattatcaccaaacagatcatcactgtgaccacctaccttcatgatcaccatcatcaccattgatgtcatcatcatcatgctcactgtcatcaatatcactatctcctttaccatcattgccatcatcatgctgtcatcatgactgtcctgtcatcttcactgtcctcattaccatcaccacctgcaccatcaccatcatcaccatcatcgttgctgtcatcatcaccattattgtcaccatcatcatcacttcccacctccttctcaatatcaccatcagcttcaccatcaccatcagcatcagcaccgttgtcatcagtaccaccactagcatcatggcagctagcatgcttgaccaccttctgtgtgcctggcaccatgcaaagctctttgcacacattgtctcatttaatttccaccgtgaccctatgaagccaagttgttattctcactttagaggtgaagaaaatgaggatcctaaaggttacacagtttgaccaaggtcacagagtgagtttctcagtgttagactcaggattcaagttcaggctacctgttgtggaaccttagtttgccaaccaccctagaaggatgagtgggaggtggctaggtggggtggggtctgacaaggagccaggagcattctggggagagggagatgcaggcacagggccacagagagacagagagctgggggcattcgagacccaaagaggctgtgtggccagagtgctgagtgtaagaggtgagagatgaagcttgagtgtagggcaaggtctgatcctgcaagccctgattggcgttttctagttttggacttcgtcttgatgacaacaggaagaccgtattgaaaggttttaagtgggaggggaccgtgattggcttgtgctgtaggaagatcactctggtcacccagtgggcagtggagctgagaagggggagactgaggcagggagacatcatttggtgtaggagtttgaagcattcattgctcccacataccagagtcctgggatccttagacatcctcagagctccctccaggtgctcttctccacaattacccagaggattgaatcaagctgagagttctcagctctcttttctcgagacagctgctcatcctttgtttggaaccctgggcctgtgccgatttgcccagtagctttcacgaacggctttcacataaagccagacttgtgctttctaaacagttgaccctgtgtgagggccgtgaccttgcagaatacaaaacaggagaggttagatctaagtcctccactgagtgctcctggggcatcctgcccccagggaggctgtggtctacccaagagcagatgtagaaaccccaattcgaccaggaggctgaatggagccactttgtcccatgctccccactgctgtccttcctccccagaggcaggaacgaggctgcctcatccagagctgagacgcatactgctgtgctggaaggagaaggccagaaccccagctcaccaagctggcattgctggtgcacgagccacccagtggggacaggcagggggcaggaggcgggagacaggggaccagctcccgacggccgtgccgagggacttctgtgggtgcccagtgggtgtccatctgcaagttggcttcaagggtcttttggccacctcttccatgacttggaatttcttattgtcctgctcttaaagattttgaggatccctagtaagtggggatcaggagttctgggttctgggtgtggctttattaccagctcactgggtagggttgggccagtcctttcccctctctgggcttcagactccttcttatgaaacaagggattggccttaggtgtcctctgaggtccctccaaagcaagccgctctatgttctctggagctcctagcaccccaatgacacacaccaaatagttgccacagacggatgggtggatgggctctgagtcccacctccacccgctcctgggtgggttgttcatttgaggactgagaccccagggcagacccggaagcctggaacacgttcacatgccacagatggaggatttttccgcttcaattatcttctttgcaggttttgggttttcagacagggctggcagcttgactgagccacagtaaccatttccgagctggctggaagcatgcatggaggacctcagggttcaatctgttgttctccttccagtatcaagagtctgaacgattccaaatacggagaaacaacctctctccgggttccttgtggccagccatcacgaaaccctcgcacctgttcaccctgcaaagcgtgatatgtctgaactatttaaacggttgggtttactgattaatttctcctcagcctcatgcctggatcctgggtgtccgccatcggagtgctggtgactgttgtggaggcaggacccccagcttagggtacagagtctcctgtgttgtggagagctgagaagaccaggtatg[226 bp omitted]tgagacaggagaatcgcttgaacccgggaggcggaggttgcagtgagccgagattgtgccactgtactctagcctgggcggcagagcaagattccatctaaaaaaaaaaaaaaaattaaggacatatgttttggctattctccaatttctactttttataccttgttaaacacattagagcaatgtcctaggtgacaatttcttgttgataacgcacaagttttgccagaagactgtctcagatgttccctgttctctacccctggtgggtttttcactgctgggtggaacctaaatgttcattgtcccttctgagaacacctgctgtgtgcttcccctgcctgcaaaaaccaccttgaacgtgatgggtgctttcggactctcagggcccttctacctctgctcatcccaaacaccacggcactggagacaaagcttttcgttcgcagccgcagccgcttgcctgtgatcatctttttccagttgggggtttcatctctcttttacaacctggctcctgctaccgacctcctgcagtttctggcggggacttgttagagtggccaaacaaacttttttttttaaacaccaacaagctatctggacacagtagggtagttactaagcaaaattatcactgctcccttctatgccccagaagtcctgaagcccacagcctgtctatccttttgaggccaaagggagagatgggcatttgaggacatggtgggaaaggctgaggctggaggacgggctgtgggtatgtgagtggggaatggtgttgacgcctgtctcctcccaacttatggcattgatcatcttttggtaggagccgggctaccaaactcatctttttttttttctttttctttttttttttgagatggagtctcactctgtcaccaggctggagtgcagtggcatgatctcagctcactgcaacctctgcctcctggattcaagcgattgtcttgcctcagcctcccaagtagctgggactacaggcatgcaccaccatgcctggctaatttttgtatttttagtagaaatggggtttcaccatgttggccagaacagtctcgatctcttgacctcatgatccgcctgcctcggcctcccagagtgctgggattacaggtgtgagccaccgcgcctggcctaactcctcatctttcttacttaccaaagcaggtaaggactctctgtgactcactaagcaagaaagtcatggatgtttctggtcatttaggagcagaaagagggggatacagatgccggtttataaaggctgagagtgcaggaggcagccactcaggagaccttgctaaggctggcttcccgctgcttgtcttctctggccatttctctgcttgggtacagaaaccaggccaagtgcctggggaacatttagctttttgttgtgagaagggaagaattagaaagtcaaatgctcctatggactgggagccaagagaagggggcagggaggctggcagggccttgaggaggcttggccactctgagggtgggtgcccatctaaggcaagcctggagctgggtgggcaagagccgggcggccccgctcctcctttccatgtcctcccctccaccgggaccctcagcctgggcccagcagggaaacccagggcgtgtgaagccgaccaaagggagatggattgaaaaacagccagctgaggagggcactggctgccaggcggaggactcggcagtgccaagtgcaaggtttctggagagctgcttatgtctcactgcctacaataacacctcatttatttggcattatcagagaatgagctgtttcccttaagtgacttttcctcccccaaactttaaaaatggaaacattttatgtgtcaaactttttattattatttaattgtggtaaaatatacataacataaaatgtaccatctaaaccatttttctctatgttttagagacagggtctcgccctctcccccagactggagtgtagtggtaggatcatagctcactgcagcctcaaaactcctaggttcaagggatccttctgcttcagcctccccagtagctggaactacaggctcaagccacagtgcctgaccaaagttaaactggatcctacgtttaaccccccgccttttttttttttttttgagatggagtttctctcttattgcccaggctggagtgcaatggcacgatctcggctcactgcaacatttgcctcacgggttcgagtgattctcctgcctctgcctcctgagtagctgggattacaggcatgtgccaccacgcccggctgattttgtatttttagtagagacggggtttctccatgttggtcaggctggtctcgaactcccgacctcaggtgatctgcctgcctcggcctcccagagtgctgggattacaagcgtgagccaccgtgtccggcccgtttagccacttttatgtgtacagttcagtggcatgaagtacattcaccatcatcaccatccgtctccagaactttttcaacttcctaaattgaaactctatacccctgaaacaacttcttcctgccccagactctggaaacctctaatctactttgtctctaggaatctgactactctagctacctcatatcagtggaatcatacagtagttgtccttcggtgactcccgggttcaagcgattctcctgcct[134 bp omitted]cggcctcccaaagtgctgagattacaggtgtgagccaccacacctggcgactggcttatttcatttagtatcatgtcaccatggttcacccaagttgtgtaaatgtgtcagaatctccttcctttttaagactgagtaatactccattgtatggagaggccacattttcttttcttctctttttttttttttttttttttttgagacggggtctcactccatctgcaacctctccctcccagattcaagcgattctcatgtctcagcctcccgagtagctggtattataggcgcaaaccaccatgcctgggtaatttttgtatttttttagtagagacagggtttcatgatgttggccaggctggtctcaagctcctggcatccagtgatccaccagctttggcctcccaaaatgttgggattacaggtgtgagccatggcgcccagcctggataggtcaaaattttttttgagacagggtatcactctgtggcccaggctggagtgcagtggtgcgatgtcagctcattgcaacctttgtgtcctgggttcaagtgattctcgtgcctcagccac[148 bp omitted]tctcctgcctc[133 bp omitted]cggcctcccaaagtgctgagattacaggcgtgagccactgcgcccagccaatttttgtgtttttagtagagatggggttttgccatgttggccaggccggtcttgaactcctggcctcaagtgatctgcccgtctcggcctcccaaagtgttgcgattacaggcgtgagccaccataccggcctgataaaccgcattttctgtatccattcatccatccatggacatttggattgcttccagctatttgctattgtgaataatactgctatgaacataggtattacccaagctttgttgagtaagcttaagtaacaaataacttattagaaatatttttcttattctaaattttatttatttatttattttagagacaaggtctcactctgttgcccaggctggagtgcagtggcacgatcacagttcactgtagttttgacctaccagactcaagtgatccatccacctcagtctcctgagtagttgagaccacagacaagagcctccacacttggcgaattttcttaattttggtagagatggtatcttgctatgttgcctaggctgatgaactcctgggctcaagtggtcctcctgccgcagcctctcaaagtgtaggattacaggagtcagccattg[136 bp omitted]caacatggtgaaaccctgtctcttctaaaaatataaaaattagctgggcgtggtggcgggcgcctgtagtcccagctacttgggaggctgaggcaggagaatcacttgaacttgggaggcagaggttgcagtgagacgagattgtggcactgcactccagcctgggtgacagagcgagaccctgtctcaaaaaagaaaatgtggacaagttaaaagaaaaaaatcactcattatcccattgtccagagaaacttctagtatacatactatttacattttgttatatacacttctgttttaccttttaatgcatacaaacattcagtttctacaaacaggattttatattcaaacatatactattttataacctactttttaaaacttactgatatcttgactctcttgctgcaacctaattttcatgactgcttggcatcttagtacatgaatgtaccacagattctgatgagtttctcactgtagggtctgaaggttgtttccagtttttttctattactcatagcacagtgaggtacattcttggagctaaacctctgtgtgtctgtttagttctttttggaggatagagtcttagaatcacatttggtgagtcagagggtgtgtgtgtatacatatatatgtacacacacacatatatgtatgtacgaatataatatgtacatataaatgtgtatatacatattaaatgtagctatattaaaatgtgtgtatatatacacattttaaaatcctttaagtcttctatatgtattggcaaattgcttgtcagataagttttacttatttgtgtttccatcagcagcatcaaagagtggcagtttctctgtaacctcactgaggctgtgtattgtcctttatgaaatctttgctaaactgaatggtaagaaatagcatattgaagccaggtgcggtggctcacacctgtaatcccagcactttggaaggctgaggcaggcggatcacgaggtcaggagtttgagactggcctggccaacatggtgaaaccccgtctctactacaaatacaaaaattagccaggcatggtggcgcatgcctgtaatcccagctactcaggaggctgaggcaggagaatcgcttgaatgcaggaggcagaggttgcagtgagctgagatcatgccactgcacttcagcctgcgcaacagagcgagactccgtctcaaaaaaaaaaaaaaaaaaaaaaaagaaacagcatgttaagttttaaaagtatgcatttctttgaacatttaaaataacatgtctgttagccacttgtgttcctttttttggggaattgcttattcaggacctttgtgtattttttccattgagggatgaatattttgttacttatttgtgagcattctttgaatattgaggatgtaaattatttgttatttcaattgcaaacagtttccccaagtttgtcccttgcctctgttttgcttctggtgctcgttcatgcagaaaaatgctttttacttttatataagtattttatgtttaacttctgcctttggtgtcatttcaataagaggttataagatattcatctactttttagtgtattctagcactttcatagcttaattttttatacttaaatcttgaatccattcctaaaatgatctgatgtaaggtaaagaatccagcctttcactttgtccatgtggacctttccctaacgcattcgaaatgctcctttgccatgtgttaattctctttggtctgtttctggagttctttctgtccaatgatacacatctgtgttcttttgccagtgccacactgttttaatattttaatcattttagggcatgaatcccatgattacaaaatcccttggctggtcttttgcattttgtttccagatgaactttagactgatttgatcaacttaaaaaataattcctctgtgcttctgattgaaatggctttaactttatagataaatgtggagggaatgagaatctttataatttttttctttttctttttctttttttttgagatggagtctcactctgtcacccaggctggagtgcaatggcgtgatctcagtgcactgcaacctctgcctcccgggttcaagcgattctcctgcctcagcctcccgagtagctgggattacaggtgtgtgtcaccacacctgatttttgtattttttagtagagatggggttttaccatgttggccacgctggtcttgaacgcctgacctcaggtgatctgcccacctcggcctcccaaaatgctgggattacaggcgtgagcaactgcttccagccaaatctttataatattgaatcttctcgtatgaaactttgatatgtccatcaggtatccacatggtttcctcatctatgtccctgaatgtttcttaagtttatatgtgggcattttgaattgtttgtagcatggtgaatggtgtcattttccagtatattttccaattgtttgctattggtatatatgaaagaaactggcttttatgtatttattcagtgactggcctggtcactgaataggggctgtcttcctgggttttatgggtagacttttttttttttttttttttttgagatggagtcttgctctgtcgcccaggctggagtgcagtggcacaatctcggctcactgcaaactctgcctcccgggttcacgccattctcctgcctc[228 bp omitted]gccattcattctcttttcttgtcttcttgcattggctacaccattcagaacaattctaactagtagggatgataatagcaggcgtctttgtcttaattctgacttaaatgggaatgtctttagtgtttcacatttctctgcttaaggagtgttaaatgcaactaaatcttattttgatgtttcagagtcattggtaatacataattgaaaaacattctgtcatacagtcataccatcagcaatcagtggagcttacttatctgttttacttgaaggttccaagttttatttttctcactcatgctctctcttttgcattgctgactcactgagactttccttgtttctcttctcttgctcccaagctgtctattgtcggtaatttctgttgtttttctcctttttcattttataaaccattgttttaattgaggccataatttgaggacgtggaaaacatttcaaatagtacaaaaataagtcaaaagtcagaaattcaaacgctgctgtaagatgtgtttccctcctatgccgacgcttgttcaccctggaaaatgtaacattttgtgtccttccagacctattaaatgcagtgtgcttctatttatgttaaaaaatatgaagatattctgggcgcggtggctcaagcctataatcccagcactttgggaggctgaggtgggcaaatcacgaggtcgggagttcaagaccagcctggccaacatggtgaaacctcatctctactaaaaatacaaaaaaattagctgggtatattggcatgtgcctgtaatcccagctatttaggaggctgaggcaggataatcgcttgaacctaggaggtggaggttgcattgagccaagatcatgccactgtactctagcctgggcaacagagcgagactgcctcaaaaaacaaaaaaagaaaaacaaaaaaaccccaaacagacaaacaacaaaaaaatgaaggtatatattcatatctgtcctgtaccagaacacaaatagaaagcacactattcatgcagttaagcgcttttatcacttaatatatcgtggcaatctttctaaatcagcagtgtggattccttagtatgccattgaatgcatataacgtaatttattgaaacagtcccctgtgtacctaggtttctccagatgttccagctgcagtgaacatccatgtaaatataagtctttgttctcctttgagaattttctgctcctaattgacttactctgacctccccccgagaaagagaaatagatgaactattcaaaactgaatgtaaactaagaataaataggttctgaatgaagatcagatgattctattgagcagagtgaatgggttttagtcaaggacttcctaccgttatcatgactgtagagtggacgtttcgctcagttctttattgtcacctggcatcgtttacttccaagtttgctggataaatgatccctcccatgcccgttcccagacataaggttgatgccacctgttcgtgtgaccctgatgcgccatatttgttacctatttattctcagtttccttatcagcatcccatacaggcttattggcctcacctggcagtgcagggtctccagcagtgcctgcagccaggtgtcctgggaggcacctgtgcagtctggagagcgctgttcacagtgagctggactgcagaccctgggagctaagaggggacaggtgaatgccttaaggagcctgcggagcaggtcttgcaggatggctgggaagggtcattgcagcatatctggcctgtctgatgcagcaggtggaaacagagactgctgaaaccatggcactggcgagaacctcatctgtgaggttcctgtggcgtcagacacagccagaagctgttttcatatgatctggactggagcagactatgggaggatgctgggtgtttccagccacacctgcatatgaagaaaacaagcacccccagtagctggggtgtggagaagagagaggttagtgagatgctgctgggaatgtaaatcgtaggggagattatggtttttagggagagaagcgatttttctctcacttctccattggccaggacagcttttgtttttaacctctaatactcattttctttctgactccaaaaacaatgtgtattaattttagaaatttaagaaaatatagaaaaatagaaaaataataacctgaaatctttccttctagggaacacactggtaacattgagtatattcttctggtatatttccattttcgttttcctttgtacatgaatttttttaatgaaatggaagtatgctttgcatattgttttgtaacctgggcttttcatttgctatatgggaaacactttgtccatgttgttaaatattctgtaacattgttttaatagtctcattggccgggcgcagtggcgcacgcttgtgatcccagcactttgggaggctgaggcgggtggatcacctgaggtcaggatttcgagaccagcctgaccaacatgttgaaaccctgtctctactaaatacaaaaaaagttagctgggtgtggtggtgtatgcctgtaatcccagcaactccggaggctgaggcaggagaatcacttgaacccgggagacggaggttgcagtgagccgagtttgcgccattgcactccagcctaggcaacaagagcgaaactctgtctaaaacaaaaaaaaatctcattgactctcactttatgaatatagagtaatttatttgaccaaacatgttgttagaaacttcagctatttccagtttttttccttccttccctccctctcttccttcctacctacctatatacctacctaccttccttccttcctacctaaaaaattctacaatgaacatcatagatacgtgtttgtatagttttataatttcctcataataaattcctggaggtaaaatgtctgttcaaaagatgaacatattttaaatttaaatttgttctccaaaaagattaaagcatttatgtttctaccagaaatattatgagaatgtcttgaactctttcttacaatagccattattgttttaaaaaatctttacctatgtaataggcaaaatagttgctgcacatgttatttcaaaaaattaaatcacctttttctgaatttaaaataatatacattattttaaataaacaatgtgacaaaatatagaagaaaaatgtactgagtaatcctttccacctaggaacaatgataattaacattttaaaaaatgtttttattttattttatttttaaatagagacaaggtctcacttgtgttgcccaggctggtcttgaacttctgagctcaaatgatcctcccaccttggcctcccaaagtgctgggaatactgacatgagccaccacccccagcctcattaacattttgatggaagttattcgaaacatcttgcttgatgtcttgtatatgctatgtgtatatgtgtgtatatatatatttacatatatatgcataatttttgtataattttgcatgcattttactctgtgttatttggtaacctgctttttctgctcagcaatatgtcatgcatatctttatttatttatttttttgagacagagtctcgcgctgttgcccaggctggagtgcagtggcacgatctcggctcactccaagctccacctcccaggttcaagtgattcttctgcctcagccttccgagtagctgggactacaagcatgtgccaccatgcccagccaaattttgtcttttttttttagtcgagacggggtttcaccatgttggccaggatggtctcgatcgcttgacctcgtgatgtgcctgccttggcctcccaaagtgctgggattccaggcatgagccactgcgcctggccttatctgcatatgcatatcttatctggtcagtaagaactatatcatgtgtatagcactacctcatctttttgaggattgctagaattcatgtaaacaatctcctttgtctaccttttaatgcaaatcattttttccaatatgatgtttgccttttatttctatttatagagtttttttgttgttttaatcagatggttagtttttatgtcatcctgtcagttagtatctttcttcatggggtttgcttttgtggttctgctgccaaactgaaactttctccagccaatcttcactttcctgacctctttgttttagttcatgctgttcctcccttcctggagggccttccctaccagtttcctaccattgagatctcctgcctgtagttcagagtatctcaaactcctctttctccatgaagttgccttgattctgtatcacccgacattttctctttattaaattcattatgttctgcctggattatgttaataccttatttgtggtgtttatcacatttcatcttgtagttatgtttatgtagactgtaaactttctgagggctagacccatcttccatgtctgcgaccctaagattctctaattcaatgcttgtcatacagtagggcctcaataaacatttgctggattgaattaaattggatttgggtggaccaaagcatccagtctatttcagggagttgattcgtgagactcttaaacaagaccagacgtgggttactctttgttcctctactgactggaattccccgtgttgtttgagatgtgtgtcccaaagagaaacttgttgttctgaagaattgcacacttgtatttatggtattgttggctttttgtatctgccactgccaaccttgtgacatctggcacttttggcagaagtcctggcccttgggaccctgttatgagcaaacacagtgattgagaagcagaccagctgagactaatccagtccagggcccatgacagcaacctggccaggtgagtggggattttagccttgtcttatacaacacagcacaagccaggatttcttcctaatccctgccttgccttcttattgggggattgtgaactgcacctaaaacataaggggtggcccagtgtggtggctcacaccagcactttgggaggctgaggcaggaggattgcttgaggccaggagtttgagagcagcctgagtgatagagggagaccccatctctacaaaaaataagaaatgtagccaggtatggtgctgtgtacctgtagtcccagctgctgggaggctgaggcaggaagattgcttgagcccaggagttggaagctgcagtgagctatgattgcacccatcactgcacgccagcctgggcaacgagagagactgtatcaacaaaacaaaacataagaggaaataataaacatgatctggtgctccactccattaatcatcaggaaaatgcaaattagagccacaaggcactatcagagtgcctaaaatgggaaaagacaaagaatatcaggtgttgataaaatactctgctggcaggagtataaacatatcaaataacagttttgtggctgtattagtccattctcacattgctaataaagacatacccgagactgggtaatttatgaaggaaagaggcttaattgactcacagttcagcatggctggagaggcctcaggaaacttacaatcatggcagaagggggagcaaacatgtccttcacatggcggcaggaagaagaatgagtgcttagtgaaggggaagccccttaaaaaaccatcagatctcgtgagaactaactcactatcacaggaccaggattggggaaactgcccccatgattcaattatctctacctggtccttcccatatccccataacacatggggattatgggaacgacaattcaagatgagatttgagtgtagacacagccaaaccatatcagcggcatctactaaagctgacatgtgcccatcttataacgcagcaattccactcttgggtttatacccattggtaatgtgtccatatatttaccaagagacatgtgttaggatgttcattgtaacactcctataatggccccaaactggacactgtccatgaatgcccatcaacaatagaatagaaaagtagcttgtgatatgtcatacagtggaatgctatacaggaatgagtatgaatagcctataactacatgcaacaagtagtcaaaactcagaaacataatgttgactaaaagaagccagatgcatactctacgattccatttatgtcaagtgcaaagccaggcaaagctaatgtatgctgttggcagtcacgatattggctaccctggctggatggagggtagtgactgtggaggaggtggcaggaggtggcttctgatggtgagtgtggggggatagtgttctggttcttggcctgaggctgattcacatggatgtgttcagttcgtgaaaattccatgagcagtatgctttgtgagcaaaaaattttctgaccaatttgatatgtcaataaaaagctaaaaagtgattgacagggtatatactcagaagaattgaaagcacggactggaacagatatttgtaccacccatgttcatagcagcatgattcacaggagccgagaggtagaaacaacctaaatgtccatggattgatgaatgaatgaactaaatgtggtttatacatgtgatatggtttggctgtgtccccacccaagtttcatcttgaattgtagttcccataatccccatgtgtggtgggagggacccagtgggaggtaattgaatcatgggggagtttgcctccgtgctgttctcatgatagtgagtgagttctcatgagatctgatggttttataaggggcttttctctcccttcagtctatacttctgcttgctgccaccatgtgtttgcttccccttctgccatgattgtaagtttcctgaagcctcgccagccatggtgaactgtgagtcaattaagcgtctttcctttataaattacccagtttcgggtatgtctttattagcagcatgagaatggactaatacaacatacaatgggatattactcagccttaaaatggtaggaaattctcacacatgctacaacttggataaaccttgaagctgttatgcttggtgaaaaaagctagacacaaaagaacaagtactaggctgggtgctgtggctcaagcctgtaatcccagcactttgggaggtcgaggtgggtggatcacctgaggtcaggagttcaagaccagcctgaccaacttggcgaaactccatctctactaaaaaatacaaaaaaattagccaggtgtgatggtggatgcctgtagtcccagagactcgggaggctgaggcacgagaatcacttgaacccaggagtcagaggttgcagtgagctaagatggtgccactgtactccagcctgggcaacagagagagactccatctcaaaaaaaaaaaaaaaaaaaaaaagacaagtaccgtatgattccacttataggacgcacctagagtagtccagttcatacagacagaaagcagaatggtggttgcccgaggttaggggagtggcaatggggagttagtgtttaatgggtacagagtttcaatttgggaagatgaaaaagttctggagatggaggtggtgatgattgtgcaacaatgtgaatgtacttaatgccatagaactgtatacttaaaaatggttaaggtggtaaatttcttgtgcattttaccatagtacaaagataggtgattgcaatagatgattgcagataataacacaacatacatacagacaaagacacacgagcagaagcaatgggccgtacaaagcttcctgtgcttcggggcctgggaaggagcccggcaggggagctgtgagggcagagcagagggggtctggaaaactgggaaaggacccagcgtgaccttggaggtagcaatagggtcagccctgctgggcacaaggctgacctgcaggcccgacacatttgagggtgctcgggccagctggcatgaagccgctctctcttgctggcacgtcaaagctgaatgtccaacaccatgacaccctggtctggcctttttttgaacttgcacagctttcccgtcaggtcctggagacagggagactttaggcggggcgatttggcccacggaagggaaggatttcccacgtgggctttattctagggagtgcgaggttggccacagtcctgacctgacagccagggacctgctgctcacaggacatttcagagtcagagccagattcctcaacacttacgaggtgttcctgtaccaggccgaggcccctgtgatggtgagtgcctctgagtggggcaggggtggggtgacccatggctgggtctcaccgtgggagcaggctgctggccatgtggggcccgtgagagacccggcagtccaaggacaggtgttttgttttgagcgtccatttcagaatgaaaagacgtggtgttagcccctttaccagcagggacattcccaaagaatgctgccctctgacacctggcctttaggaagagcccccaggaagacaccacacctgggccggatttccagggccagcccccttgggtcagcttggtctgctccatctgcccagtcctaggaaatccagcttttcttccctttgcattgccccaccccaggcttattcattaggtgtcctgtcacctctccgggccttttctgaaggtatctggagcctggtgtgtgtgtgtgaatggtggccttaaaaggcttaggaacatttgggggctgagaaaagaatgctcccagctggcaggtggatgtaggaggcattaatccagaatcatttttcctgtggagacggctttgttataaatctgtcaaaacgtgggcgttcttcagtgttcatgatattatccctggctcctgtggggacaggggtgggagtaagggcgcctagctgagaaacaggattttctcctaaaagatgtttggttccttgagatctgttctgtctctctctctttctctctctctctctctctctgtctctgtctctctgtctctctctgtttctctcctccttgacctcacgcagttggtagagtacagccaatttgtcactggttctttagaactgtgggaatcctccccctcccccaagtcccccaaatgtgcaggtgagctggataagtaggcagcctaaagacagagggaggtgggttgaagggaaggaagaggaaatgaatggtgagcagacacaccctggtattccgatttaaaaaaaaaaagaaatgctagttgggtggggatggggagtggggaaaccaagagaccatctggaccagctactcccaaagcatggccccccaaccagcagcgtcaacaatatcgcctgggaacttattagtgatgcaaactcctgggccccatcccagacctgctgaatcagaatctgcacatcaaagttggagaagcgctaaataaaccacacttcctggtccagagatgggaagtgacttgtctgtgatcacacaggtggttaattgcagagaaggacttccagcccactgcctcacctgccttgcgggtgagatggagcagtcgtacctgactcttggcactcagggtttgtgccttggcaaatctggttgtgttttgtatcttgggggcagaatttttgtgtgagttattatcaaccaaagatggttgaagtgtgaagctgtaggcctgcctcggagttagcacacggaacggaatatcctacatgtagttttggttctgaccactgatttgccatctggcaaaatggcatttccttccttccttcctcccttccttccttccttccttccttccttccttccttccttccttccttccttccttccttcctttcgacagagtctcgctctgtcacccaggctggaatgcagtggtgcacgctcggctcactgcaacctccgcttcctgggttcaagcaattctcctgcctcagcctcccaagtagctgggagtacaggtgcccaccaccatgcccggctaatttttgtatttttagtagagacgggggtttcaccatgttggccaggctggtctcgaactcctgacctcaggtgatccacccgccttggcctcccaaagtgctgggattacaggtattagccaccacactgggccccaaaatggcatttcagaaccttttgttgtatcttcgccgtcaccatcatcatcatcatcatcacagcacagatcctttattttgcacttactgggatccataccccgtgctaaacacttaggttatttcctttgtcacaccaaccacatactgatcgcatttaaagctgaggaagctgagcagcagaaagataatgtactcgtggtccctcatctagataaaagaaggggtggaatttgggtcaaagccccatgtgaccccagcagcacacttatttacacttggggtattaggtaaaactgtagtacatcttgtatttgtgacactctccaactctatgattctgaggcagaagttatcctttaagcgccaaatttgtttagctattattaccatatgtgaaactgtttggagacattttgtaatcccaacactaatgtctgtaccaatttaatttccatatgcattttgtgttttaactgtattttaattaaagactgaaatggaaattctgtgcacctcagtcagttgagagaaaagaatcttagatgctcagataaaatgtgatttatgctgttgcaaaaaatgtgaaagacatgtgggcacttactccccggttatgactgtttccagattatacattgttagaaagaaaaaaagtttgggggtgcgggaggaacgctgtgtgaacgtggaaccactgacttagacccctggctcattcagctggaaatgggatgtggaagcccaggttgtggctgacttctttgaacttctccacaggctggggacattctggtaattgttttattgtatttgtagcctacagtgggtggtggtcggcaaaccatggtccatgggcagaatctggctggccacctacttttgtaaataaagttttattggcacacagccacacccatttgtttaagtactgttatagctgctttcgcactgcaatgtcggtgttaagtcactgtgacaaaaactgcatgggccgaaaagcccaaaatatttactatctggtcctttgcagaaaagagtttgccaaaccctggcctgatacctttttggacaacatttcctaagttttctttctgctgtttgtcataaatgcttgaaacccatctattcactggctccctcattcatcaaacatagtttgatcacagtggtaagaaatcttgcttagctcaggggctgtgggctcatgacaaaaaagaatgtaatcaaagattataggcttggcacaaagaaacattcagtgaacttgtgtaagttagggttctacaaataactgaatccactaattcaaggaggaagggattcatgcgaattgggataactctcagaattgttgggaaggctgaagaaaagactctgggctgagctttcaggaacaaactccccaacctgctccccagacagatcaccaaggctgctacaatcaggaagttacagaagcaggcggtggggatgttatcatgcagccagccacagaaccatagctctggcacaatccaccccaggaaggggtgcctcgtaccctggccctctccctactgcttcacatcaaagtctaatcagcagagccggagtcacacgcagaggctactgtgaggaagtctggggagggttttcgactttctggcctttggatgctgatcaaataatccacagacaccccatggtacaggtcattgtatcctgaaagatagagtgttcaactcatttatagtttgtattaaaatttgagaacttaaaacattattcagtagacatagcaagtgagactggtccagaatgcccaggaaagcagatgtggggtggtatagaaggcatcctcaggtccatctccaaatcctgcccactcatccttcaaggctctggcgccacctccttcaggaaggtgtcccaaggctggctggtggtcctttctgtcctcagcatagttagaacactttgtcttatctgcccactctctaggaagttacagtattctccttcacaggatagttatatctttctcttcaatgtttttctttttctttttctttcttttcttttctttctttttttgagacagagtctccctctgttgcctaggctggagtgcagtggtgtgatctcggctcactgcaacctctgcctcctgggttcaagcgattctcctgcctc[134 bp omitted]gcctcccaaagtgcaaggattacaggcgtgaggcacagtgcctggcctgaagtgtttttctttttgacctttttttaaaataataagagaacattgccaagtttgaaatacttctcattttcctttttagttccattcaatttctttcttcccagaaacaaatagtatagtcagtttatctttctctgtttttcactttaattacatgtatgcatctttgcacaatacagagtgttgtctgtgagttactttatctaagtgatattttagtggatgttccagtccctgacttactgtgctattagatagatccatgttactacatagaattccgtttcattcattataagcagtatatggttgccatgccattgtataaacaagctacaatgtatccattttctatcaatggccagtcagcttttccccagttttttcctattataaacattgttgcaataagcagcattgtccatatctcctggggttatgaatgagatttctcaagggtagataccaagaggcataaattggtcatttccagctttactagatattgtcaaattgctttccgaggtgattgcagcaattcccaccagctctatgtggaaattttcatcggcctatattctggctaacacttggtattgtcagacttgtgtatttttgccattccgatggtgtgtggtttaaatttgcatttgcattgttgatttaatttgcatatgtctgattattgtgaggttaagcatcttttcatatgtttattggctatttaggtttcctttgctgtgacatgcatattcatagctagtgtgtgtcttttctcttgggttgtctttttcttatttatttgttggagttctttgtatattctggatacaagtcctttgttgtacatggtgccattattttctcccagtctgttcctgtccttttcccctgctgtccttttgtatcctctgacctgatttttgcttcatcaaatgcttaaacgagtgcagaatgatgcttccccaccaggtgcaacctgactcaaaacccagggtgtgtatccgtgagaaaacttgacgacatcccttgaggtgctgcctggtgaggtggggtgagcagaatttcatctccttcccctacctcctgcctcttttttttttctttttgagacagagtctcactctgtcgtctaggctggagtgcagtgatgcgatcttggctcactgcaacctctgcctcccaggtttaaacaattctcctgcctcagcctcctgagtagctgggattacaggcacctgccaccatgcctggctactttttgtgtttttagtagaaacagggtttcaccatgttggccaggctggtcttgagctcctgatctcaggtgatccacctgccttcttggcctcccaaagtgctgggattacaggcctgagccaccgcacccagcccctcctgcctcttttctatctaggtgtgctagcttcctagggccgttctaacgagttaccacaaactgggtggcttaataatgcagaaaggtgttttctcctatttcaggaggccagaagtccacagtcagggtctcagcagagctggtttgctctggaggccctgagggagaatctgctacatgcctgtctcccagtttctggtggctgctggcaacccgtagcattctttacttgtagccgcatcattccggcctctgcctctctgcctctgtcttacacgatcttctcctctgcatgtgtctttcccttttctgccacccattattgggtttagggaccaccttaaattcaggatctttttttttttttttttttttgagatggagtcttactctgttgctcaggcaggagtgctgtggcgcgatctcggcttactgcaacctccaactccctggttcaagtgattctcctgcttcagcctcccgagtagctgggaggattaccggcacacgccaccacgcctggctaatttttgtatttttagtagagatggggtt[142 bp omitted]ctgcaaagatcctatgtccaaataaggtcacgtttacaggcagttaggtcatggacatatctttttgggggtcattatttgacccactagactaggcaaatgctatgaatttcagagaatagctagcctaaaagtgaagtgtaggtgtgtgtggtggtggtggtaggagaggtgaagggggtgtcaaggaagaaaaatgcatctgggagaggcaggttcttctgggaggcacagttcccccagagaggagaggcaatgcagctgattcttaaacaacttagggggtttagaggcactgactgcccctctgcaataaaaaatctggatatttttgactcccccaaaacgtaactactaatagcctgttgacaggaaggcttactgataacatcgacagtcaattaacacatattttgcatgttatatgtattatatactgtattcttacaataaagtaaactagagaaaagaaaatgttattgggaaaatcgtaaagaaaatatatttactattcattaagtggaagtgggtcatcatgaaggtcttcatcctcattgccttcatgttgaataggctgagggggaggaggaagaagaggggttggtctcactgtctcaggggtggcagaggcacctgtaaatggacccacacaattcaaacccatgttgttcaatggttaactgaacattttagttgtctattgaactaaaattcagtggtcaacggccattgtggattttcacatttttcatctatttagagtccccagaaaacagataacgggtgttcaaggaagatgcctcttgggtgaacaggtacaagccaggcgaaacctagctgtgcccattgatctgccccactgctatgaagctgcgcctgtggctgtatcccctgcaagggagccccagtggggccaaggacaggacactctgtgaacagctgctgtagatcctgcctttttgaagataagtaaagagaaaccaagtacatttctacaattatggaatccacaaataatgaggttcagcaatactattcctttccttcacctattcgttacaatttgtgtaaccccaaaataaatactcagggccctttcatggtcattcatgatgggcacagagaggtgaaaaatttgagttacctggtgtgcatgttcccagcgagattatttcagctctcatactgtaaacaagtgtcttttcgttgtctgctcggtgccacgattttcacattttg[175 bp omitted]gtggcaggcgcctgtagtcccagctactcgggaggctgaggcaggagaatggtgtgaacgctgcggggtggagcctgcagtgagccgagatcgcgccactgcactccagcctgggtgacagcgagactccgtctcaaaaaaaaaaaaaaaaaaatgcaccccacccccttccacagtactaaagtgctgtctagcatccccaagctcaagaagactgtgatttgctttatggagaaaatgtgttagatacgattcgttcaggtaagaagttgtattgcttttggctgtaagttcagtgctggtgaatcaatgatacgttttgtatacagaattttttttatttttatttttttgagacagagtctcactctgtcgcccaggctggagtgtagtggcacaatcttggttcactgcaacctctgcctctcaggttcaagtgattctcctgcctcagcctcccgagtagctgggattacaggtgcccgccaccacgcctggctaatttttgtatttttaatagagatggggtttcactatcttggccaggctggtcttgaactcctgacctcgtgatccacccacctcagcctcccaaaatgctgggattacaggcatgagccaccgcactgggcctgtatacggtatttttaaagcagaaatacatataaaaaaagggtacatactgaccagtttgcgaaaatgttgtgactaaaggctcacaggaacttaaccctgtattttccctgggagcaatggttcattatttgctgactattcatggcagcttgatagaatgtgaataccacagctaatgagcatcaactgtatctgaaggagcccgcttctgaaaatgattatacagcaagctccgggagaacatgtcaggagattggcaccctcttattgcaggaagacactttctttgtgcaatccaagcagactttgctcaggagaggacagtccgagactagaaggcagcagaatgagatggaaatagagatgtcatatagggagagagtataggaaaaagccaactgcagaatcaaaatccatatggtacagagtaagaggcagattttgttcaaggatgttcactgcaatgttgtttataacagcaaaaaaagatgtccaacgatgggagatgagctaaataaactctaatgtagacataaaattaaatatatatgattcaggccaggcgcggtggctcacgcctgtaatcccagcattttgggaggccgaggtgggcggatcacttgaggtcaggagtttgagaccagcctggccaacatagtgaaacccatctctactgaaaatacaaaaattagccgggcatggtggtgtgtgcctgtaatcccagctactcgggaggctgaggcaggagaattgcttgaacctgggaggcggaggttgcagtgagctgagatcacgccactgcactctagcctgggtgccaaaaaaaaagaaaaaaaaaaaaaatatatatatatatatatatgattcagctattcagatattgtgtattatttattgacttaaaaggagtaagggaaaaaaaaggaagattcaagtgtaagtatgacgggtctgatacttttaaaaaatgtgcatatgcttacttagaaaaagctttgcatgattctattaacatatttagggtgtataaggtatataaaagttacttttaattacaaaatgcatctatttctgtagtgtttgaattttttgcaaaaaaatatattgatgttttacttgagttaaaaaaaaaaaagataaacatggaggccgggcactgtggctcacacctgtaatcccacactttgggaggccgaggcaggcagatctcctgaggtcaggagttcgagaccagcctggccaacatagtgaaaccctgtctctactaaaaatacaaacattagctgggtgtggtggcgggtgcctgtaatcccagctacttgggaggctaaggcacggagaatcgcttgaacccgggaagaggaggttgcagcgagccgagattgtgccgctgcactccagcctaggcaacagagcgagactgtgtctcaaaaaaataataaccataaataaataaataaaagtgggatgaaagatgttaccagtataaactgttgggcagcacttcttcctcttttctctcatagctcctggtttctactgacctgcagagtttatgaaactgctgttcccatctgtctgttcatgtctgtctttggattgtgaaccacccaagggcagtctgtatttctagaacctgacatggtgggaggcttctgtgagagaagatgctacctgcatttttcttgggtggatgagtggtaggcttggaagatggggcaggatgctggggcgccaggccgggggtgcagtagaaaattctgctctgtgcaaactcctgttcgtcagttctgtgacagctcccctctccttctgcctcagctccttgagagaaaggactgtgtaagtgggtgaatgaaaaactaatgaacttgagctcattcatttgggtgggccagacagcaccttaataccgattcagtaagttcaagcctttgagagagacttttgagttcaaggatgttcaactctttggggtgagcaaataggcaatggaggtggttttgaggtgttcaccaaagacccacaatgctggcgtcagccttgcatgtgttccccagggtctcccgggggtctcctgctcaccagttaaaggctttccttctcagagctcattgtcgggaagagaaagccgggctcctggctggaccagtgtcctcatccacgtgacgttcctggagctggacagatcccggctgaaatctggagagggatttgataaatgctctaaaccctcccactgtgtgcactggagttaatttaaaaaccagcttcacaaacacactcagaggcctcagaaggaaagcagagggcaggcaagagccgaggtctgtgccctgactcatccttcccccccggggcggggacaaacggctctgacatttcccggggccgcagcccccagagacaaacgaacggatgggccgtggcggagtctctggaggcgccggggcagccttggatggggcttgctggtcttggccggccgtgcgcggtggaggagggctggcgaggcggcagcagccgtgtactcgccgtctccgaggccgtggaggaagggatttcgtgtttctccctctatgaacagtcggagaattttcctcccataaacaaaacaaacatgagccgaaggggcggaggccccaggggcaggctgggtggccctttctttcaacctctctgcatttgtttctccgggggcagattgtggcagcttcttagagccccagaaagccgcctgtgggtgtcgtcatcttgcttggttaaccgaacacattgcctcttggtcctagccagggctctgctgttcctggaggagcggctgtgggccagctagacccttgtccacagaggcgagtggctctgcagaacattccacgggggtggcagaacaggtgcctcttggcatgggcaggcggcatggtggggtaggcagagcccccgggagggtcaggaagcagccacagagttttgagccacccacccacccacccaccagcttgctgtgtggccttcaccacgtctttctcatccctgggccttagcctccccatcttttgctccagaagtcgagctgggtgatttctagagtctctactcgctgtttgtttttgtgacccggggaggggcagctgcgatggtggagggcacccttctgaggccccctcctctccctgccctctttctctccccacatctctctgatttccccttatttcactgacaaagcttaaaatcccagggctttctgtagatagtggggctgcggaagacggtgcctgcctcggcttgaaaaccaggcccagaaaacactgccatccatcacgttctcattgtcacctaggaaggccccagaaggtcagcttccaattgcctctcagtacagagcgcgtttgtgttgcttggggactgactgtcctttcacagaacttgtgggaaaatacctcttctcttctccagaaaaggtgatgagaaaggtattatttagaaggtagacaggaaggagaaaggtggaggcatattccactctatgaaaggacgagtatgggattgaaatatttgtaagcatggggcacatcctattaacagttgatgtcggatatcttgtctgctttcaggaaggatttgtggccgaggtacaaggggtggcttttgatatgaaaatgtgcattgtggctccctgaatgaggggggtgggagagggctgggatggccccactgggcggggagaggagcctctgggagcgacacccggggaagctgtgaggcgtgaaagggtgcttttaggaaagtctggatcagacatgatgttataggaaaaaatgcagcgtctaaggaaacagcgcgtgaatagagagaaagccgagagacagggcagggaggcagagaggacataaagcagattggcattggcagccaggggaaggagctgcctggtggcaggggccacagactggagggaggatggcagaggacactctgcttcccagggaagggcccggcctggggcggaaacttgcagaatggctgatgacaccagtagttgggcttgcgctcctcagaagcatgaggacaggtggttcacagtgtcactggccctgggtctgcacctggaccaagtaaagcattacctcaagaagctttcatgtgggccgggtgcggtggctcacgcagtagtttgggaggccgaggagggtggatcacaaggtcaggagttcgagaccagcctggtcaatatggtgaaaccccgtctctactaaaaatacgaaaattagccaggtgtggtggtgcacacctgtagtcccagctacttgggaggctgaggcaggagaatcacttgaactcgggaggcggaggttgcagtgaggtgagattgtgccattgcactccagcctgggagacagggcaagactccatctcaaaaaacaaacaaacaaacaaaaaaaccaaaaaaaaaaaaaaaacaagcttccatgtgcacggcgtgtcatcccctgcctccaccacccaactggtgggtggaggacagattccacagtaggaaaaagagtctctgcctgttggaaagggctgagaggtaccatctgccacctttttgtccccctcatgttggaagtgaaaagggacaggtgccctatctcagggctgcaagcaatttctagaaacgctcaagagcgtagctcatggggccatgccacgtggcctcaaatccaggctctcccattttccaggtatgtgtgaccttgggcatgctactgactccctctgtgcctcagtttcgtcacctgtaaaaggggtataatgtcagtgtctacctccaagcaatgtgaggattaagtgtgtgtgtttttaacagctttattgagatataatccacatgcctcataattcccccatttaaaatatacagttcaggccgggcgcggtggctcacgcctgtaatcccagcactctgtgaggccgaggtgggtggatcaactgaggtcaggagttcaagaccagcctggccatggtaaaaccctgtctctactaaaaatacaaaaaattaaccgggcgtggtggtgcgcacctgtagtcccagctatccgggaggctgaggcaggagaatcacttgaacccaggagtttgcagtgagctgagatggcgccattgcactccagcctggacaacaagggcaaaactctgtctaaaaaacaaaaacagaaacaaaaaccggttcagtggttttcagtatattcagagttgtacaaccatcaccataatagattttaggaccccaaaataaaacccatacccatcagcactcagtccccatttcctcccacccaccccctttccagtgctgaacaaccaccgctctactttcggtctgcctggatttgcctattttaggcatttcatagaaatgaaatcatataatatgtgaccttttatgtgtggcttctttcccgtgacataatactctctaggtctatccagtctcaaggttgtagcatgtatcagtactttattccttttcattgctgagtaatattccattgtagagatatattgcattttgtgtattcattcactggataagggacattttagttgtttccatttctttgccattgagaataatacttgctatgagtatttgtgtgtggacatgtgttttcatttctcttgggtatatgcctagaagtggaatagccaggtcctacataactttgtttaactttctgaggaactgctggactgtttttcaaagtggctgtaaccatcttatgttcccaccagcaatgtatgcgggttctggtttctccacatccttgccaacacttgttattatttgtctttttaaaaatgtattatttatttatttatttatttatttttcagacaaagcctcactcttgttcctcaggctggagtgcaatggtgcgatctcggctcactgcaacctctgcctcccgggttcaagcaattctcctgcctcagcctcctgagtagctgggattacaggcacacaccaccactcccagctaatttttgtattttaagtagagacagagtttc[144 bp omitted]gtctctgtcacccagactggagtgcagtggtgcagtcatggctcactgcagcctcaaactcctgggcgtaaatgatcctcctgcttcagcctctcaagtagttcagactataagcatgctacaccacacctggctaggttttaaatttttttgtagagacagtctcactatattgcccaggctggtctcgaactcctggcctcaagcaatctttctgctctggtctcctaaagtattgggattaaaggcatgagccgctgtgcctggcctggcctttttttattttagccgtcctactgagtgtgatgtggtgctcattgtggttttggtttgcatttccctgatggctaatgatgttgagcatcttttcacaggcttcctggctatttgtatacgttcttttgagatgtaactatacagatgttttgcccagttttaattgacaagttagttcttagaagtgcttatctggccgggcgtggtggctcacacctgtaatcccagcactttgggagaccgaggcgggtggatcacgaggtcaggagttcgagaccatcctagctaacatggtgaaaccccatctctattaaaaatatttttaaaaaaattagctgggcatggtgg[131 bp omitted]caaaaaaaaaaaaaaaaaagtgcctggaaggagtgccttgcccatgggaaatgctgtgcaacttactattagggagagtacccaagacttggcacattgggcttctctcccccacgttaaggattttgggggccctgcataaatgtccaagcgtgagggaacatggtgacttcacattttctttagttttcttcaaatagtcccctacttggggagagactgcgatggtttctcccccacacaggtcatattcccacctgaccccttctgatttgatttcccccaagtccctatggtggggtgcacctgctgcctacatctggctgcctttggtgatgacttcagtgctgcttagtatctggattctgttcatctgcaagcgcccccaagaggctgctggtggtagtgtgggttgatgtgggcagagttggtgggggtcccagggagtccccccagccccttcccagcgtcatagcgacatggtctggggcttacattacccccatgttgtttttgtacagcaggaagctgcttgctacccaggtggccattcgacttcatattaaggtctcctttccattttctttttgcttaaaaatactcaggttttcacaagagtcacttcagttcttggtgattgaactcagctctgatttgacctcagcatttcaggtacatttttggctcttctggagacagaaaaccatcagggaccgcaaggattaagcctcagggtgaacattatcccaagtggtgggaccaggatggagggcttcccctgtctcaatacaggactgtgtggtgcgaggaaaaagaaggaagcggatggccctgtcggggggagagctggatgtcatcattaaaaatccctgcagccgcttgttcatgaaacccctcactggggatgaaactcccatttcctcccaaaggatagttttctccttcttttcctagaggccgtgtacattcaggttcaagttccttgtgactttcacttcttttccccatgaaccagcacgtccccggccgctccctctccttgatgtgcgggggtagctgatttttccttccacagtataatatctggcaattgcacctcatcctatttttgctctcctcccccatcttctctgttcatccgtgcctgcccaatgcgtgcttccccggtgatttttcccactcacccccggtgctccttttctctctgtgacctcttggcagttctgtgcatacgtaggattattgttattctggcactgtgatcactggcgctcactcacatgctctctgcagaggccccgctgcctctccccacattttttgtgcctgtgagccatgcagccatccgtaccctactccataggaatgtggcctggagggtaccccaccgggtcagctggtcagctgcactaaggccccagcccaggggtggcagctctggtcagtaacatgtttgtccctgagtggagttgaactgactccttggatgccacagctgccctcccacttacaaaaaagagcctccccacacacgtccttttcttccccaggcaatcccacacctacttcctcaaatcagtcctcctgtcaccttttcagacctcttgttatctcagccacctcccccaataccctccaatctgccagtgcccttcttgatacaggagagctggaatatgatctggtcagtgcagaggggatattatctttctctgtacgcatttggggttctagggagttcgtttctgagttacatttttttttttttttttgagacggagtctcgttctgtcgcccaggctggagtgcagtggcgcaatctcggctcactgcaagctccgcttcccgggttcacgccattctcctgcctcagcctcccaagtagctgggactacaggtgcccgc[185 bp omitted]actctagaatcctctacagtttggttcataactagcaaatggtgacttgaatgagaggctttgggattggggcaatgtctttatttcccagtgctcctcttaaccagattaaaggggtgctgtgaagtttgacctagtggaggggtgggtctcgggaagcattaaacaccaagcagtggttgggttgttaggcatcgcccagcccctcatcttgtgcttttgtttctgcttaaactatgttcttattgtatttttcatgtggcaaaggcaatatctatttggtgtagaaaaattataagatatagattaggacaaaaagaagaaaacgcaagtaacagtttatcccaccagccagagtgacgatgttaataccctgtggtgtgtctgttgcctggtggacctttttctatttgcgtatgtttccactatatgcagtcatacttctttttacttaatacattgtttccatctttccactttattaaatagtcggctttgtagttttgcatggttgcatagtatttgtattgcattttgtgggtgtaccatgactccgttaatcaggcatttaaatttggacattttgctgtttttcaggttttttccactctaagctttgttgggctgagtgctcttttaagttgatctttgtgccattctcagtgtccccttcagataaattcctagatgtgcaactgtacatcttcaaggaataagcacatgtttaagacttttgacgcgtttgtatcttgctctcccccaagtcataccagtttatagagtgtgaattttttttctttgtttcctcaggtatattgcatattaattactctaaaaaaacctgttggccaacttggaagacaaaaagtgatatttgattgttttcattgatttgtctttgataattaacaagacaggttgaacatttttcacaagtttatattttgtgaatcacctatgggggcgttaataagttttccaaaaagatgaactccttacatatgaaagatagtaactttccgtccatcttttgtcctacaggtatttctcccaggttgtaattgactttttaaaatgtatggtgctttttgacatataaaagttaaagttgccgtctattagatacgtattttacagtttttactttcagtatcatacttcagaaaggccttcttgatcctaagattccataaatgttcacttacattttcttccagtaatctttacggtttcactttttacatgtacatatctcagtacatgctgtgaaagtcaagtgtaactattgttcttctcggatggttagccagttgctgcagcaccacttactacccagtgtgtcattttctctccatttcccaccccccattttgggggttctcattgtggactttctgtttgattaagttttctcttggttcctatcacagttctgattcttgtagtctcatgatacattttaggatgtctggaggctttgtaagtggtaaaacaccatgaaaaatgtgaagggttattcatgttgttgtaccagatctttgaaaacaccgggagcgcttactgtcctcgctggtgagagtaagtcacctgttttttttagagtttttcttcagggatcctgaagtgatgctgtcttctgaaccagcaaatgctcaggtcttcttagcaacctttggcctgtcccctgaccccaaccatcacgcagtgcctgccacctaggaaaggctgggtctgcgtcaccaggtccctctgttccatgaccacatctcataatcacatccatttttcttaaaaatcagcagcctcactcttctgactcatgttctctgacttctagacgcttttcttccataattgggtgtgccgggcacaatccttgttttttccttccagaggtggggaattcagggtggaaatgtggcagaggacgtggggcttcctcgctctgtccctgggctgttgccatgacagtcggttggacagacatgtcgtggtgtgccctcctccctccggcttctctccggattccacttcctgaactctgagcaggcctgtgggtgggaagccggctgggtggtctgcccagacttccaagagatgcttggccacaccttgtgcagggcctaatatgggcttgggccacactcagaccacactcagctgtgctttcctttccgacagtgatgacgatgatgacagtgacgaggatggggggctctgatggtgaactgggaatcctgcataggcctcctagtgagaagtcacagcttaatttaccgagcacctacctacctcatgccatgtcatagaggatgacagatgctgtggggaggtaaaaggaactcgttttgcagtgcttgtccttgcctggtcagccacggcggcagagtcaagggattgagctcccaaaaccctgggacatgacggcatcggtttacaccccgatctgcctctgctatgacacttggatggattgcttagcttctgtgtgcctcagtttcctcatctgtaatatgaggataatgcttcatagagttgatgtgaggattaaatgagtcggcatgtgtgtgcattttacagagcctggcacatgctacatgttagcagtcactctttgttgttgttagtgtgtatgtgtgtttcttttgtatacttctagcacgcggggagctccatgagggccttttatccaccttttatttttttaagacagagtctcactctgtcacccaggctggagtgcagtggcacaatcatggctcactgcagcctcaaccaggtgggctcaagcagtcctcccaccccagtctcctgagtagctgggactacagatgcatgccaccatgtttggctaatttttttttttttttgagacgtagtttcactcttgtcgcccaggcaggagtgcagtggcacaatctaggctgaccgtaacctccgcctcccgggttcaagcaactctcctgcctcagcctcccagataggtgggattacaggtgcttgccaccatgcccaggtaattttttgtattttcagtagagatggggtttcaccatgttgggcaggctggtcttgaactcctgacctcagatgatccgtcttcctaggcctcccaaagtgctgggattacaggtgtgagccactgcacctggctgattggctaatttttaaaaatctttttgtagagatgggatctcaccatgttgcccagtctggaacctatttgagggttatttatttatttatttaagagaggaggtctcactctgtcacccaggctgtagtgcagtggtgcaatcatagctcactgcagcttcaaactcctgggctgaagcaatccctccacctcagcctcccaaagtgctgagattacaggcgtgagccaccatgcccggctctttcatctttttttatattcatgatcacgtgaccttctgcagagtggatgctccataaatgtgtattaactgatgatactgatacgggttattaccatcacttactgtgctgggctctttatcacattatctgatttaatcttcgcagtctttacattaaatgttttgtctgttttacagatgagaaacctgaagctgagggagcctgagggacttgtcaaaggttgtctagctgacaaggggcagggccaggcatcgtccccagccagcctgattgcagaagcagagtcaggatggctgaatgaacgacgcatggggtggagacaagagaaatccttaagaaagaattagagaacaacatagcacttaatgaattgaataggatcatgagcagtgggtgacccagacctacctcat[136 bp omitted]ataaagaaaccctgtctctacaaaaaatacaaaaaattagccgggcgtggtggcgcatgcctgtaatcccagctactcgggaggctgaggcaggagaatcacttgaacctgggaggcggaggttgcggtgagccgagatcgtgccattgcactcccagcctgggtgacaagagcgaaactccatctcaagaaaaaagagagagagagagagagataaagggtatggtaagttctgggcacatcaaaggagtttgaatgctgcatttggtctcctcaggctgatgctcctgtctggccccttctgctctggctcagtgtggctgttggggaaggttctggaaaaattagggcttcgcattcagctctgatgatgggtaggagggctgtggctaaagaggaacaggtgggaatcagcggagtcaagcacagatagagggaacaaaccaggtatactgggagtcgtggccttgagggcaccccactgtggaaagttgcagatatcagctcgagggggctgtatttggctgacttggcaatggggaaccaggatggtgtttgaatgaaggactcatgggctcattttcacttcgaggggagaagggaggctggtagcagggtaccacgtgtctcatgcatatcctggagaaggcctgagatagggcagccgtgcatggatcagggaggcggagggaggccctagggacatgggatcagagcagtgggcaggagtgagattgtggtagggccgggggggggcaggacagggagttaggattttattccaggtgtaaagggaagctaagggggtgtgtgttgagctgggtggtggcatgaacctgctatgttttaataagattgtcccggttgctctgcaggaggcaggggtagaagctgggaacagccaggaggccttggaagttttcaggtgggagatgacgggggcttggctggaggagaggtggtggtgagaagtggccccctgtgggatccgtgtggaaggcagtgtcaccagaactaggtgggttgtttgtgggagcgaaaagaaggaaagcaatgacccgtgagtccttctcaagggtttgtgtgactgaggagcttggtgccactcattagaggacacaggtcctgtgatgtaggctggcacgatggctgcctggtccctctttgtagcactggggagcgtggtgcaggctggagtgaaggacggttggagtggtggcaggtgcagagaagaggccaggctttgctgctgaggacccctggacacactcggtgtctactgggcacacttggtgttaaaagccacagtgggcacagggggctggagaggcaagtgaccaggtaccccaggcttcctgcagctcagacgggggaactagaaagtcctctgagaaaacatgtgccaccaccaatgattctactgatgggccagacatgagcggcttgggttggagctaattctaggatgcaggaagagagaactcaagttcctctaaaagtattctaggttggtcgggcacagtgatgcacgcctgtaatcccagcactttgggaggctgaggtgggtggatcacctgaggtcgggagttcgagaccagcctggccaacatggtgaaaccccgtctctactaaaaatagaaaaattagctgggcatggtggcacacgcctgtaatcccagctactcaggaagctgaggcaggagaatcccttgaacctgggaggcagaagttgcagtgagccgagattgcgccactgcactccagcctgggtgacagagcaagactccgtctcgaaaaataaataaataaataaataaataaataataataataaagtgagctgggtgtggtgatgcatgcctgtaatcccagctacttgggaggctgaggcaggagaatctcttgaacccaggaggcggagg[131 bp omitted]cagggagaggtgttgagaggtgggtaatgatgatgatgcttctggcaaccagccctgggccaagggagccagctggagggacagaaatggggcttccctagcccacagctgtgcttggcccatgcacttctccttgtcccggtgcaaagcagtgagactggccctcatcttctccagcgtgccccattgtctcacactaccatttttggactcattttttctgtctaaactgaaggctgcacctggtcgttttccttggattcaaactgtgagaggaagacaactccaggatccttggtataccgggtccctgtggtgtaccgagggagaccctttgccaattctgaggggttcctctggaatgctccctcctggctccattctcagggccgcctggccagcgttcacccaacccgagtgcagagtgtggcaaaaatcagaatcttcataagatttccatgcactgagagaacaaaaagaaatggtccctggagtgaagcaaaaagcccattcgccatttatcccaagtgctgtggaacagaagaaagagcatttttaaaatgaaccaaggggcctgcagctctttccccaatgctgccctgtgtaacccaaggctgggcctgcgtttctttgcttgcagcactggggcttggctctgtgatccccgagtccctctccgcggtaacactatccaaggcagcgctcactttcgttgcctcggccagcaaaaagagagggcgagattaacaccctcaattacgtctttgcagaactcagacctgaggaaattgaaaaacactcaagccagcgtgggactgggtttagagggggtctgctggggacgccattcagggaattgctctttccaaggctcctgagtggctggggaggctgggcctcctccagcctcattaaaaggtactttacctggaaggccccagagcccaggtccaagcagagggaacagctgaggggaggtggtggagctggagcggctgagctgctgaattgtgagtcttcgtctggcttctggtctgagtgcctctgctcactggtccttcttgtttgcctgattgtttttcctcttggggaggagatggtccttttgagccccagcattctgagtgacagactgagtttcatcccatcaaaagttctgttcaggctaaagcttctgtgtatgtcataaggaaagtataaatgaaatcaggaatctcccccaaaagcatgtcaccctcggcgtctgcctcccctgaatctccgtttgcttctcagttaaggatgccgtgttttccatactgtcacctcccgtgccatttggaatgtggataactcagcatgcaagagagttccacgctctctctggacctcccggctgccgtctccccttctgcaggtgtgagcatgtgtgtgcagccattgactcctgagccatccttcctgtttggtggtcccagacctggcaaggtgtgggaacgtgtgcaactcgggattgatgaaatacagaaaatctcagcccaacagagtctgaaagctgcgagttcaccaggccagtgatggtgtgtaggcctctaccagcctcccaggcattggatctggaggaaggggccttatctgtgagtggcttcttgttggcatgttggtgataagggaccctgtgaagttatgtcttggtgcctgaaagccatcgagggcttgctgggacacgtgcaggggagtctggtgacacctgggtcagggtagtcagtggctgtctcgctgttttctacctgttgacagcagtcatctcataggtgtgggtttctcaccttcctgaggcagatggtgaagggagcagggcagattctttgcaggaggctggtatgggtttcactccagcaccatgggtcctcaggccagctctctgtgtccctgctcctccgctgtcaggtggaaatcatcctgaggactaagggaggcggcaggagtcccgtgccttgctcacaggtgataactgctcagggaatgatgcacctgttccctccctttcctgagtactgggggaggtgattaaagatcaggtgtgagaggccccgtgtctgtcctgcaggagttcacagtcttctttggagacctctttgttctccaaagccccacctggggtggccagctgcctcctgggcagccttcccctgggcaccccttaaactcatccactcagagccagatatgtctgttcttccagacctgccctcactcggggtttcttccttggtccttgacgtctcttggacaccctaaacaccccagggtcatcccagacaattccttcttcctcacgtgctggtgttcagccccaggtctgaacccctccagtggtttcttcctcctctgtcattaccctaccctgattcaggccctcagcccacatctaaatggtctcccaagctccacaccatctccccaccttgcaacgcctggtggcgtgatggttgtccttacctatcacatgcattctctcttgattctctgagtctcgagtgctttattctcaagttgctattgaggccagactctcctacaccagggagtttgctctgttccccctctgcctaagtctgggttgtgtacacccctcgtctgcactttccctaattctctgtgtgtgttccagtgatggcctccttgctctttctccgctctgccaggcacactcttaactcagggcctttgcactggctgtttcctctcctgacaagcatgctactcctccctgtgtctacatggctcacatcttaacttctttaagttctttaccttcatgtcattgactcaacaagggctccgtgatcaccctgtagaaaaccataacaccttttccaacactcagcataccctttcctccctcctgcctgatttttcttcatgacacttagcatcctcttatatactctatggtctcctaatgcgctgtgttcattgtttctcttcaatcacgagaaacagggatttttgtctgttttgttcattgccacatcccctgtgcctggcgcataggcttttgagaaatatttgctgaatgaatgaatgaatgaatgaagtgcatcctatgtatcctattcttaaatggtccattttggcctctcctccactagcctctgccctgcttgagggctgggctgtgctcggtttgtctgtgtttcggccatggtattcccttgatgctttttttttttttttttgaggtgaagtcttgctctgttgcccaggctactatgcaatggtgtgatattagctcactgcaacctctgctttctgggctcaagcgattcttctgcctcagcctcccaagtaactgggattacaggcatgcacctccacgcctggctaattttttgtatttttagtagagacagggtttcgccatgctggcccttgatgcttttttttattattatcatttttaagacggagtcttgctctgttgcccaggctggagtgcagtagcatgatctcgactcactgcaacctctgcctcctaggttcaagcaattctctgcctcaacctccctaatagccgggactacaggcgcccgcaaccacgcccggctaattttttgtatttttttttttttttggtagaaactgggtttcactgtgttagccaggccccttgatgcccatttgatgaatgactggtggtctcagcctctgtttcaatactctgtccgcgcaggagttagaccatgtcactttggcctctgaaaggctagattcctgggtggtttctccagagcactcatccagtccctcgtcacctggccgtggcctgagcaccttctcctctacccatcacactcacactctgggctcattctcctgtcactctgtccactaacaagccatgtactttcatgaacattacacgtttccacctccaaacctttgttcctgctgttccgcctgccaggaatgtcctcactcctgacatcctggaaaactcctatgcatctcacactagctttgaaccttctacccagcgcacaccttgtacatccgtcttctctagcagggacctactccctttctcatgcctactcctttgctagaatatgaacttttcacgtgcagctgccacaccctgttcatctttgtgccctttaatcctagcactgtgtctggcatgaggctgtcctggatgtttaataaatcagcaaggaaaagaatgacacgtccggccaggcgcagtggctcacgcctgtaaccccaccactttggggggctgaggcaggcggatcacctgaggttgggagttcaagaccagcctgaccaacatggagaaaccctgtctcaactaaaaacacaaaattagccaggtgcagtgacacatgcctgtaatcccagttactcaggaggctgaggcaggagattcacttgaacccaggaggtggagattgtggtgagcccagattgcaccattgcactctagcctgggcaacaagagagaaactctgtttcaaaaaagaaaaagaatgacacgtccacactgataataccaaattccctttaactgagggtcaaaatgagctgagtgtggcccagcctgactccaggaatatctgaaatgctgttggttaagcattctggccaaaaccttccacggactgtagacgctcacaacctgggatgaggtctcctcccctccaccttaacggctgaccacaccttcacccagtgcgagccaccgagagccctgccagcttctaagcctgggcaactatctagtccttctcctttccctgtcagggatctctgacactgcatgttgccagctgctcctgggggagtctgacggatgccaccaccgccttggtctgttaagaatctactggaggcctcagggaaagcagctccaggcttccggagaggtagtttggctgtggttctcactcacaggacctgttgtgccaagaccaggaggtcaggtgctcgcctaagggcttgccgaggaaggatctgggcagcccagcaggagcagggccatctctcctccttgctcccaggcgacttgctgtgtttgagctggggccttaggtttactcagcaggtggtgtctacacctgtaacgaccatgcagggctgggagccagggcgcatgcttaattcttgtcctggctgga[132 bp omitted]cctccacctcccgggttcaagcgattctcctgcctcagcctcttgagtagctgagattacaggtgcgcaccaccatgcccagctaattttttttttttttttttttgtattttagtagagacagggtttcaccatgttggccaggatggtcttgatttcctaaccttgtgatttgcctgcc[136 bp omitted]cctctgcctcccgagttcaagcaattctcctgcctcagcctcccaagtagctgggattacaggcacctgccactatgcacagctaattttttgtatttttagtagagacgaggtttcaccatgttggccggctggtcttgaactcctgaccttgtgatctgcccgcctcagcctcccaaagtgctgggattacaggcatgagccaccacacctggccctcattgaatgtttaaaagccccactcatctcataaacaggattcccttagaatatgtttgccaggacccctttgttcctggggccaataacagctgtcctctttcccccagatgactgatttcttgccaacccctcttagtgataactgggtgctcaccctctctccccccagagcactccctccggtttctgtgcccggctggggttgcagctgcctctctctggacctcactggaaaatcagggattgactagattgggagcatggtccttgtatattagaatcacctggaactttaacagaactactcacgtcagggcctctctccacactaattaatcagagtctctggggtggggaccacactttttaaaaagctttccaagtaagtctaacatgcagccggggcagagaaccatgagaatagacagtctttctgctctgggcggccctgagctttcaggggttccaaatgttcagggcccagatgctggctgctcattgccctgtgggacccttctaggtgcgaagtgaacatgcagagacagtcagtgcatcacagagcccgctgagtttaagcctcaggcctggggtctttccatggctgttgttttctaggtatttgcagactggaaatgaacctaccaggacttctcaataaagcgtcttcctcctgccctgcttttggttctgggtcctgagaaaggtgagaaagcttattccagaactcaatagtcttgtttgggaggcctgtccctgagttccagacccagggggtgctgcctcctgaatggacacccccattgtcatgcagctgacacctccaacccccatacccagaccaaattctccgagtgctgtacctggacacgggtgtccccatccacaccgagggcccggtaaggcacattgtcccccagcccctgatgctcccggcccatcctcccttctctaccccattcctttgtctttgctcaccttgccagttcttcccatctcctgtctgggctgccctttactggctacaggagggtcactgttctgctggaaagtgtctgagagcagctgccacctgggtctgaatgtgtcccccagacccaacacctctttgcacagtcctgaacctgtgtctggctcttgcttcccctgcagccatcctgccaaccagaccacactaacgttgttctcatgcacggcttcctctggcctctgagcctttggacgtccttccccctattctcgggttgtctcctgttcccagcaatagttcattcgccactgtcggggtcaaccacttagtcctcttgaccatgagactctcctaagttctgaatgcagaggattggctgagatccacgcttcttggagcccattggcttccccttgaattgtcacgatggcccagcactgttgggttcagctggtgtgtggagcctctgctttttctgtagagactggactcttacttcttctaagctgttgtctcatctccaggttgaggttctagggctccctggagtaggcctggtggggcacttgtccttagagccctttcctggcaatctgttctggcttccagcattccagggcattggaaggggcatttaggagaccagggttctagccctgagtccaccattcactccctgagctcctcttcacacatgtcgactgagcacagcccatactcagagggcagcatgaacactgccaccccaaacgtgtctgtgtgcgcacgctcactcatacatgtgtgcacgtgcctactcaaactcgacacccatcctcctcactcccgcctgggaagctctaagcccatttcctcgtgtccccctggtgcgatgactcaggctgctttctggaatcttcctagagtcagtccccactcaggggaaactgagtcacagcttgacaagagtgggcaggaaatgctccagcaacaggccagcagctaggggcagcagagcaaatgctgccctgcacacctcagtctttacaaaaccaaaccaaacggagcctagctttactttattctgaagtggttcagagtagacgataataacactgttaagaaaagagtatagtgtggctgagtgtggtggctcacgcctgtaatcccagcattttgggaggccaaggcaggtggatcacctgaggtcaggagttctagaccagcctggccaacatggtgaaaccccgtctctactaaaacaaatacaaaaattagccaggcatagtggcatgcgcctgtaatcctagctactcaggaggctgagggaggagaattgcttgaacccgggaggcagaggctgcagtgagccaagattgcaccactgcactccagcctgggcaacagagcaagactctgtctcaaaaagaaacaaacaaaaaaagaaaaaaaagaaaaaagagcatagtgtaacaaacgcctgtgtgccagctcctagctttatcagattgtaacatgatactttctctgtgtgtgtgcgcttcatccttttattatttttttgaagaaattggtctttatgaattcctcctccctgccctagccttgcaagctgggaacacacactgtggagaggaccagaggtcaagccctcacctctcctcctgccacaatttcaggctcttcgcagtcggagcctgttcagacctttccttcctcactcctgcccagctccttcctcgtggcagaaagagggaaggccttgacagtcagcccccatcacttcagcgcacaaaaaggggtgtgtgtggattgttgagaaaaatacagaagttgactcctctctcaggattcctggtggtgttctcaatttttcctatgccattttcttggcctggaatttcattttctcccctcctccacacaccctgctcctatctatgctttaagacctggctcaaatgacccctcctccatgaagacctctctgatggctggcttagaaatagtctctgcatttcatcctatgttgtcagtgcctggaatttgagttttgttcatgcatcgtctcccactcctaccaggctgcaaactcccggggactagcgaccatgtctcctgtttgttctgtattcccacccccaccccatgccagtaatgatgcgaagctggtgggcagtgactgtctgctgagcgaatatttgattcctgaggtgtccccagtacctagaacagaactggcatggggtggacactcagtgaagattgtggcgtgaatgaatgaaccaatgaacagagcacagagtgccctatccgtgg[136 bp omitted]atggtgaaaccctgtctctactaaaaatacaaaaaattagctgagtgtgatggcaggcacctgtaatcccagctacttgggaggctgaggcaggagaatcgcttgaacctgggaggtggaggtttcagtgagccgagatcgcgccactgcactccagtctaggtgacagagcaagactccatctcaaaaaaaaaaaaataaaactgttgacgggcatcttgggtacttccggcatttccggccttcccggctggacttggtgttttccctgtgcctgatttcaggaatgaggtggatgtttcgggatggccaggccagggcccacgtgcctgcagtgagctcagggcgggctctatcaaaatcccgctggtccagtcctgaagtgcagtgggcaaccagatgtgctccacctccctccccagcccagccttccctgtcccaccatgaggtgagagcgggcctctgaagccacagggcctgctggtttgcaagaatccccggcgtgtcttttttccagtgagtgacttttaagttgtcttcagaatgattgctcaacttgaaaaccccctgggcgggtgtctggggtggtttggatcattgcgcagcatttcattcctttccccaaattgctcattatttcatttgcataaattttagtggtgagataccgccccaggcctaggaagctcaaatagacctcataatggggcatcagagacaagtggtgggggccccgtctggccagatcacgtgtctgcgatgttctcaggctgtgtcctggcaggagcgggcttggaaggaggacaacaatgtgctacttccagggggtaggtgtcctgcagggctcggtggctggaccccagacgctgcctctccctgacctcaacctgtccccccactctccgcacactgtcaccaagtgccctgcgtggatgggagatggaagccagacagagcctcattcccagctgggctctggcatctccttgtccatcaatccgtctgcacctacttattgggtgtgctgacagccgcgtgccgggtaccgcgatgaggcaggggtggggcagacaggggagtcaaagactggaggagataaggccaggcagctgtgttaggtaccagggaggggcagagctgtcagggctggggagtgggggattggtgaacctgggacctgtgggctgaaaatgggggcttgaagagagtcttggttggtcaggacccctctagggctgaccttcccacaaggtggctcagggtcaccagtccccttggtactctggctgctgggtggttggggcagtgagcagatgcatccagggctcaagtcccctccgatatccctgaatgtgcttttcacctaagaccattttccagtgtggcgtgtggtggaggctgggaaggccatcctggggcaagtctctggacaccatggaggaggggatttagctaaaaggtcttcgggggacagggactaagtaggcaaggcccaagcatagtctttcgtggaggggctcatgggggtgatgccagtcaggggattgggaaggttgtgggggccttgaatgctgagcttaggaatcgagacatgtcctttaggctctgtggagctagggcagctttctgatcagacaataaatgaggtgctttaggcctgttgacccgctgtggagcaggtaccggagggccaggcctgacgccatgggggtgtaaagtgggcagaatgagggcagagggagaccctaacaggaagtcatacctggcaccttccctcaccttcattggctccttctgaggcaatgcaccaagcaaaaccatatttcactgaatcctggcatggtccagggacagagcttgctgggacccacaggcttcagttccaagagaaggagtccacgctgccctctcaggctccagttttccaatgatttcctcatcatctccagaaactcagttaatataatgcctctcagtgtttactgagagcctcctgtgagccaagcttgcttttaagttcagtgagagaataggagagaaagaagacatcaccctcgtcctcagggactaaccataactatatgcagtgcaatttacattaaacatttttgggctgtgactcacagtaaaaatgtatttaccattatgaattattatctagtacatccatctacctacctacctactcacttatccatctacacctatccatccttccatcatctgttcatccatccattcattcagccatctatccatcgattcctccatcatttattcattcatccattcatccatcatccatccattcatccatcatccatccatccatctgtccatcatccattcattcatccatctatccaaaataaaagttcaatcaacccttactctgtggtccactcttatactttcagtttgcttctattttttttttaatgctgtccacgattcactaaactggtctcatgacctgctaatgagttgttagctgcagtttaataagtgatggccactctgaagagttgaagccagcatacatacactccttgttagattgtctaggagagctgtgttctcctgaaagaccgtcgggtggtgtgagctgtgtgtgctctgggccaccaggaaaggtggaggtcattgtgaggactgtggcgcagagcaggagctctgaagtaagaatggtgttacctgcagtgcagtctctgcaccccctgccctggtgctgtggcagaacgggtgctttgcctctgaaaacaacagaaggaaagcacaggctgaactcgttgaaaaataaaaacataaacttgaaataaaaaaatgcatctctgagctggcatttgttgagttccccagagtgaaagcagtgttcatggaggtgaacaagcaccagagccagatgtgtgtgtgcaggtgtgggtcagacccctatgacagtgagcccctgtttgacagcttgtgggactcaggaggccagaggtaaaggcagggcttcccccatccccagtgaaaagtccaacaggagttggccacgcaaaatgtaaaccctaaagcactgcactctcaatgtaagggccagtgagaaatgaacctgtcatgtaggaggggagagtgaagagaccagtgtgttctgacctttgtcctgcacaggagggaaaaggtcgtctctccctagaattcattaccaccggccagctctcaggcaggctgaaaacccacatttgtgacccctgtgccagtctaagatgatggtgacttggactagggaaagaagtagcaagatttgggagagaattaaaagtaagagcacttggtgatggattgattaggtaatggggtcaggggagtgggcggtgacagtggtgactggatttccagcttgcacgtgtgggtagatgaaagcatcatttcctggaagacaactggatttgggagggaatatcatggctttgatcttagacaccattaagtttgaagtgcttttgagcaatctgagatgtggggtgggcggttggatagacacgtcagaagctcaaagaagatgtggggactagagatatatatttgggagtcatttccccccgagaagacagatcattgaattgggggagattaccaagggagatagcgaagtaagaggagagaaggcccaagtgcagctggaagaacgccagctttaatgaggggggggagaagggcaagcatgaaagggaggcagccctggaggaggaaaaccaggcatatgtgctgccaggaaagtcaaaggaagagagggctgtggaagagatgcggtgaactccgtcaagcctgccgaggggcctagtgagagaggtggatccaacatgagttggattttgcaatatggcagacttaggtggccttagcgtgggcgtcctggtgggataacagggcaaagaagatgcagcagagtggacggaaaagtgagtgggaggcagcaccatggaagctggggagagacagtacctagggagatgtggggttggaggagggcttgcagagaggggagcagtctgagcatgttaactaggataggagttgggatgaaaggggacaagaggaagaggctgtgtgtgtgagagagaagggaaaggtgacggtttatgtttcctgaagaggcaagagggagtcggatccaaaacacagttggggctgggcacagtggctcatgcttgtaatcccagcactttgggaagctgaggcgggtggatcacttgaggtcaggagttggagatcagcctggccaacatggtgaaaccctgtctctactaaaactacaaaaattagctgggcgtactcaggagttcgagaccagcctggccaacttggtgaaaccctgtctctactaaaaatacaaaaaattagcaggcgcctgtaatcccagctactcaggaggctgaggcaggagaatcgcatgaacccgggaggcggagcttgcagtgagccgagatcgtgccactgcactccaggctgggcgacagagcgagactccatctcaaaaaaagtaaaattagctgggcatggtggcgggcccctgtaatcccagctactcgagaggctgaggtgggagaatcacttgaacctgggaggcggaggttgcagtgagttgagatcgtgccattgcactccagcctggacaatagaataagatttcatctcaaaaagaaaaaaaaaaaaagaaaaaaaccaaacagttgggggaatgggcctagatcggggaagaaaggtgaactgccagacaagatgtacaacctcctgcacatcttacacagcagaggtgtgcaacctgctgctggccatgccttcaccaggaggctcaggcttagccagcagcaggtagcagaggttcttctctgtcagcttccttttcttttgagaataggaggtaaggatacacctgtggagtgtgaacctggagaaggaagatgatgggaggggggtggaggtttgaagagggcggggaaggcttgaaatagggaggtgggtgaaagtgacacatctcaaggactgatttattcattcatggacttaatagatatcaccgtgtactatgtgccaggcatgtctctaggccctggggttaatctgtgaaccaaccaaccaaccaaaaagtctgtccttatggagcttacattctagatgagagaagcatagtagatgaattagtatatgaagtatgcatgtgctataatataaccaacaaaatcagtatgtaaagtatgtagatgctataagttgatgtaatgaaatcaatatgtaaagtccgtgtctgctgttagatgacgtaataaaatcaatatttaaagtacacatacactctaaaaggtaatgtgcagtgaagaaaagggaagcagaggagggtgtgggtttggtattttaagtggcatggtcagggcaggcctcgctgggaagtgacaaatgggctaagacctggaggtgatgagggatgaagggcagccgtctggggagactggtggtcatggttttctgaaagtatccatctgccctgtgtggctttgtccagaagggctgtctgtctggacgggagtagaggatgagaagaaggtagcgataaagggccacagactccagagcccggggccttggcctggatgctgtcggatggcagcagggggaggagtggagagaaagcagaagcatggccaggaagctgggaggcatgagcctgggaagagggggaccagcctgagccctgggtggggaaagggatcccctgggagctcacgggggtgcattttgctatctcagccgttttatttgcctgcaacaggggaatattgaggcaggccaggcagcctgccccttctccagcatcctcactttgctgtgcccttttggtttttacattgcctgctctgtcttctacctcatggtcaaactgtggctctctctcctgaattccatgtaaatggagagtaaagacgatctagggatgggactctcctggtgacaactgttttggctgctcagagaggtgtctttctttctatgttgttcttgactgtgttctagatggtctccgttctggaaaggagaggttgtcacaatgagaatctcttaaaatggtgggtatgagcaaaaccatgtcacgccaatgctggaacagtctgtcttaactgggaggtccctttgcgatgagctagctttacttcctaagggactgaggtctgcagaggccaagggtctccctgggtcaccctgtttgtgatgttcccctgacatggaatcctaaatacacctttacctgctttttttttttttttgagatggaatttcgctcttgttgcccaggctggagtgcaatggcacaatctcggcccactgcaagtccacctcctgggttcaagcgattctcctgcctcagcctcctgagtagctagaattacaggcacgcaccaccatgtccggctaattattgtatttttagtagagacagggtttcaccatgttggccaggctgatctagaactcctgacctcaggtgatccacccatctcggcctcctaaagttctaggattacagacatgagccactgcgcccggccgttaccgtcttttatatcgatctccccataatgaactcatccagtgcacaaaccctcctgtagagccatgtgtccagcatctagtaggtctcccatagctgcctggacctgctgtcaggagtgatcatcgtaacatcaactactgttcccctgggtcagccactgttgacagctgggcaccattactgtcctcattcctagataaggaaactgaggcatagaggtgatcaaacacacccaaggtcaagtgcacagtgctagcctgagacacacaggatttgaactcctgcatcggctcttgactcccctttgtcacctccaagttgtactgaagttgaggcttaggctcccagagggtgtgggccctgggctgagtgttttatgggccttatctcatctgataagagggtgcttgtaattactcttctttcactgaatagcaaagtggacaaggagagatcaggtgactggcgcaggccgcataggtggatggaaggctggaacaggccccctcttagcacctcgctccccggcctcccagcctcagtggggtttgctgacgaaacaagcgagcacatggaggaaatgcggtccagcttctgcctaatgaatcccgctgtttcagcctgtttgcatttgtcaagttaatttgccttccagacagaaccacagaccagtgtccctgcctcctcgagggtgggagggaccccaggaccccctggagaggcacacttgaggaggcagacacaccggtctgtggtctgtaccccacagctatctccagctccaggtccagggagggccagaaggtggagcggcgggggccagtggcgaggacagtgcgccaccccccgaggctggccggctccccagctgaggcaggcgcatgaaatccgaactctggagggaaatttactgcacaataaaggaagaatggcctgctttggggacaattaaatccacattactgtggaattacagaggactcctggggaattagccacatccacagcagccaggagcaccagggccaagaaatgtggggcgttcacatgtgggttccctccaaccctgacttgtactaggaacctgtcttgttcccaagccccctaattttagggtaagaaaaaacattttcaaagactacctgaggggaactaatgtcataaaacaacgccaccgggcccagtgtgtatcttaaatagatctattctggtcacaaaaccaactgagtcacagggtggaggtctggggaggactaaccccctaccaccccatttgcagctgggggagaagaaagggccaggcttctgagcagagtgggccaggcgtccagtccctgtcactcctgtgagctgtgtgagtccagccagggtctcgacattattttctggcttcctttaattggat[131 bp omitted]caaaaccctgtctctactgaaaatacaaaaaattagccgggcgtggtggcaggcacctgtagtcccagctacttgggaggctgagccagaagaatcacttgaacccaggaggcaggggttgcagtgagctgagatcggccactgcactccagcctgggcgacagagcaagactccatctcaaaaaaaaaaaaaaaaaaaaaaagtgtggggtatttagaagaacagatgtgtttgtattcattttccatccaagcctctgcgggctggaagaagataaggagactgtttctgaagtcacaagttgggcagcttgagctgtctagggtttgggagacccctgcgaggcccttgtgccctttcaagcacattcctcagttctcttcctgccgtaccttcagcagtggtgcaggcatgtatggacagagacaggaggcaaacagctgagtaaggtgcagggaggggacactaggatccagggctcatgaggaggcttgaagcataatgacccaggggtgcctggtgcacagagactgctccacgtgagtcatgtgtcactgttacggtggctgagtggaagtggcaggtgtgaactgccccagctttgaaggctgccctcagctcccacctcctgccctgagctcatctcattgttctctgcattttctttcttagagctcccagaggcccctcactccttctgggcacagacttcctgcccattttgggggtgagtcctcaaggaggggaccaccttgcttatgcataccttggtcctcagtcctgaaacaagcagccaatgcactcctacctcccatcgccttctgctggttagcagggctggaggggacctgtgggtctttagacacaccctgggggtctttagacacaccctggggctcctggcagccatgccctctgggtgctgagacagagtgaggcgggacaatgtctctgattgctagtgagctagggatttggcccgtgctattggctctcaaaacaatttggaggaggaaagtgaggggctaactcgccgcaggactctcctttcctggtcagtcccttgttggattcttgcctgggagtttcagagccagcgaggcactggggttgcttactgtccccatatgtggaggagatgtccaaaatactcagtagctggtgcttctgggtaataccccggcatcggtgttgagatgctggccatagacagctgccttgctacctctctgtggaagatcagtctgccctaaagcttttgaacccccaaaggcctgttcagaggatgttcagctatggagccaccatctctccatgaggaagagcttgtggctttccccaggctgttttccctggctgtactagataactcaggacatcattgcagaaggacaatttggattcttcccgcatttgcccacagggaagctctgctgcgcagtccctccccgtaaggactcagggtcatttgcagactggaaatcccttccatta[172 bp omitted]actagggaggctgaggtaggagaatggcatgaacctgtgggcagagcttgcagtgagctgagatcgagccactgcactccagcctgggcgacagagagagactccgtctcaaaaaagaatattagcaaggccaatgctaacctcaaacctgtaaggatctgacatcccagaggcaggaaatgtgtcttctaaggctctctgagttggaagggtctcgatcagtctagttccacctcctccccagagccggagtctcctgtaccgtatttttctacttgaaggtctccagggatggcaaagtcactgtcccccaggggtggcccattctagctcctttggccagctggaatctgccatcccctgtcttatcctctgtttgatggtaggccacctaaaatctttcattaaatctcatagacactttactgagctctaaatgaattgtacctagtggtttgattaaaataactggattcagaattggggttcagattttgatcattttcaccacaaagcatatcatgatgaaaatggctttgtttgggtacagatttggggccactctggccatacttgccttcctcccccttgtgtctcctggaactggagtgtgattggttccacatggggatctttgcatgtgaagtgggggcatgctaactagtgacagggcctcttgaggggctgggtaggggcagaggggcgtggtctgtctgtttggcattgacggccctgcagacagtgccctgcaactggaaagcagtttttgggtcatccaatgggcagggtcttttcccttctcacaaatctccacgtgctcctgggcacaggtatctattcttgttcagcagattgagagagggaaataagggaacgacaagctggtgctaagcaaataggaactgaagaagcagacaaccctttgagttaagaaaaacccaaacaggactcttctctcctagacctgttgagttgaggggcccttttaacctcttctgggacttgtggagactgaggaaattaaagtggctgttgataaaaaaaaccgttgcgtgaaatcgtacatcttaggcacagcccaagctgggtagggatctggtgtgtcctggaggtagcactgacatgccagtcttggggcatacttttactaaaaatgatttgtgccattcaaatttaactgggtgttctgtatttttatttgctaaacctggcaacccgagtctagtcggagagtgaattaggaaactgagaaggcgttttggtgttgtcctggagtggcccaatgggacactggtttctgttgggcacacgggggtccagcgtgcagattgggaccctggtttcaccctgtccctgtccacgagcaggaatcttgatctgttggtcacacgggggtctggtgtgcagtattgaaccctgcagtagttttggctgcagtctgggctggtctctggagtttacaacccaagtcaaagttaactaaagagatgaattaaataaaggtcaagcagggagggatacagcccatgggggtagaggggaacaaagggctggggaaggtgtcctgggaattgcatgttttcctgcctggtgtctggagaacagaatcaactgcaagtcattaagcctcccttgcaccagcctctcccactgccctggagtcccgccttgaatctccagcctggcaagtgcctggcttagtgacgggagccattacagatgggaaatgactccagggagccaggagccaggcttggccggcttggctggcaaatcagccctcatatgtccatttcataaagcacagggagtgtatgcaccacctctagggaaaagagattggaaggaaccccccccacacccccacacacaccctgctgccaccccccgagctgctaaccagacatctgggcagggcgggcaagtcacagagcaaagagaatttcatggcaacaaaagcttccgggagaactttgctcagacaatctcttccagtttgaaaattctctgccttcaggaatgaattccagcagccacagggttttatcaggcttctttctgcctgagaccatgtcaccctcaccatgctgctgggggtctggaaagagctctgaattagtttggtgaagtgttagtcaccattcactattgccaggtccctggcaacatctctttgcttcttgggaccttgttcttctcatctcttcttctacaagagggtaaactaggaaaccctggaaggctgcaccagccccaagaccctgggtttgtccttagaacaatgtcccccttccttcttttgctgatagatctggagcttggagaggactgggtgggatggggtgaggtttcatgcagggtcttattataaggaaggagcagggcaaggcactgtggtgagcacctgtaatcccagcactttgggaggctgaggagggtggatcacttgaggtaggagttcgagaccagcctgaccaacatggtgaaaccccatctctactaaaaatgcaaaaattagccaggcatggtggcgcacacctgcaatcccagcactttgggaggtcgaggagggtgcatcatttgaggtcaggagtttgagaccaccctggccaacatggcgaaactccatctctactaaaaatacaaaaattagctcagcatggtggcgggcgcctgtaatcctcagctacttgggaggctgaggcaggagaaccacttgaacccaggaggcagaggttgcagtgagccaagatcacgccactgccctccagcctgggtgacaagagtgaaaccccatctcaaaaaatacataataaataaataaggaaggaaggagcaagacctccagtctctggacccccactgtgaaactgtttttgtcctgaaaggcaagaaagtttgcatctcatagacagtgggcagccatggaaggttccagaacagggcagtgacaaatgagaggaatgtctgaagagggatttggggtggcgggctggttggaggtggagaaggcgtagagttgtgcatggcacatagagggccagggctaaagtccccgaaggaggtggcagagagagcactcaccctctgcctggggcagaggctccggactggaacgtggacggaggatctgaggaacgcagcagacaaagaactgatgactgctcagggcttaccaaagcctgctcggcatttcctccaagagaggggcccgcccgccgggcaggcggagagaaggatgtttgtgcagcaggaaccctgagtgattcttttgcagcaagggcctgggacatgttcgttaggaggggattgtttcaaagccttagggggaggcatagcagccaaaaaagggcagggaagagaaaaggctaagatgtttacagagaaaaaaaaaaagtcagtggaaaaaatgacggcgaggtcaagcagatttgggggatggcccccgctgtccactggggaggggccgggtgcccggcacagcgggagaaagaaccacagggcctgggctgtgctttttggagagccgagcccgtgaccccggtatccttaatcctgcccgtggtcctgatcccaaaccccacgaaatgccctctccggtctgtttgccgccagcctctttgcagggaccacgtccatcagttggtcccccctggacatttctgcttgaagaaggagacaggactcaccagacttaagacttatctgccccccacccctgtcccttcccccagaagcctaagagggtctggctgcggggtgggaggccaactcctagcagcccttttgtctgacatcttgacaaaggggctggggcctttcccaagccccacaggtgtgaagaacttgttactgtagtgtttattcagccctattagtggcctgaaggactgttgacagaaggcccctttgtgttcagacttggctaaagctccctaagccctcgacaaacacaggccacttatctccggggactttatcagaaaccatctaaagcctgtctttggcaagccgggaactccagcctcccgtcccactctgactgtgactccgggcactgaggttccaaaacacttcccactttctttcatttttcctaccaccttgatccacccctcttccacggcatttctggtatcagagataaagcacaggtggtggtggggagggggaagggagggtggacagaaattctgttttcaaattggaccctaaaaactaaatggagtggccctgcaggcctggttctgaaagagagacttaagagaggtgtatgggctcctctctgggagaacttggcttcaggggcctctaaggctgaccacggagggtccctgtggagaggtgaagccagctggacttcctgggtctgctggggaattgggaaaattgtctgtcttacaagaggattgtaaaacacaccaatcagcactctgtagctagcaagaggattgtaaaatgcaccaatcagcgctctgtaaaacacaccaatcagcactctgtaaaatgcaccaatcagcactctgtaaaacgcatcaatcagcccgagtctaaaagtagccaatcgcggggaggattgaaaaaagggcactctgataggacagaaatggaacatgggcagggacaaataagggaataaaagctggccccccgcgggccatgagtggcaatccactcgggtcaccttccacgctgtggaagttttgttcttttgcgcttcacaataaatcttgctgccgctcactctttgggtccgtgccacctttaagagctgtaacactcaccgccaaggtccacggcttcattcttgaagtgagcgagaccgggaacccactggcaggaaccaactctggacacactattgctcactgccctctgctaaatccccctgctgtgccaccgcatgcccaaaggtaaactccttttttctcccccaaaatagtttcctctgcccagttccccggagaggatcctgcacacccattctctctgaaagacccaggtggtcatcagtcctgttggccacgcccctctgatggttcccctgggaaggctcccatacctccactttcagcaagggggaagcctgcagggtcatcccgccaccaccccagggccatggcaattcccagctgtgatccacccgctgcctggaggtggtcttagagccctttccacagccctgtcactggcttccaccctgaggcttcttcacagcgtcattacctagcctggagcaccccacttctgaattccagggtcccctcccaaaggcctccatgctgatgtgagtctgctgatctgtcccctaccctgcaggagtttgggtatcatgagttagacttttagggccagaaaataacttagaaatcatcagacgcagatgtcttcatttttcagatgggagaatgggttcagaggggccaagtgggctttccaggtcacacacctgggggagtcgcggagccggagctagagtccaggcttcccacatcaggccccagctctctttcctcttgcttgcttgtgaggttgtagccattgtgtttgatcttggttagtaatagtgacactccagggggcggccaggtgcggtgcttcatgcctgtaatccaagcactttgggaggcctaggagggtggatcatctgagatcaggagttcgagaccagcctggcccacatggtgaaaccctgtctttactaaaaatacaaaaatgagccaggtgtggtggcacgcacctgtaatcccagctactcgggaggctgaggcaggagaattgcttgaacccgggaggcagaggttgcagttaggtgggcagatcacctaaggtcaggagtttgagatcattctgggcaacatggtgaaaccccgtctctattaaaaatacaaaaacattagcagggcgtggtggcgggtgcctgtaatcccagctacttgggagcctgaggcaggagaatcgcttgaacctgggaggcagagcttgcggtgagctgagatcctgccactgcactccagcctgggcaacagaacaagactctgtctcaaaataaaaagaaactctgggggttgactcagctctgtgtgtcttaggagggaatgctggtgaatctgtgcacccaagctggagcatcatcacaggttggggctttgagaggggtttgtttggtagctgcttgaattaaaaaccacagctcaagagaaggaagagggggccacggtctgttgagagagcagaatgcagcaacgtcagccctatggcaggcgtgcttcccactcagagctgggcacttccaaggtctccgttcatgtttgttgaatgaagcaacgaacgggcagtcaggtagaagcgggtcctgttttggtgtccttgtggcatctcgaagtgccacatcttccctcacatggtctctggaactccagagagtcccatgggacatccttacctcgcctggctctcatgccctgcgtggactgactctacctgttgactcttttctttcagacaagtgagttgtccagttctcctggccatatctaggagactgtttgtcaatggtttttaaaatggttgaaacgaggcatcctcaatgagtgcaaaccccagagccttgagtggaaccaactactcctgtgtgatgtcctcacggtccccgtaggggtcatccagtctcgtgactccctctggctggtcactgctgcattttatctggctggctgatgtctccagtgacgagccttaagcctatgtttgggggatagtggtggacctgggagtgagaccacagcggcagcagcattaaccagaccttagcatgcccaggtatttccaccgaccctgccagggcagggaccatgattgtcctgctcactgtgacgtccccagcaccttgcatggtgcccagaatgcaccaggtaggggctcagtaaatacttgttgaatgctttgataaattcatgccctaccagatttgctaatagtgaagtaaaacctaagtctgggcttggattgttttataaatgtatgtatatgtatgatcgtttctcttatgcccagctcacctgtagacacaaaaggctgtgagtcccagaaattcttgggccagtcctgcctcggcccctttcccaaaaggagccctttgagaggttggctcagaatgatccccaggtgtgggcgggagttaggtgtgtgggcagctggagttgctccacccagccatttcaggagacgctgaaaagggggctcagaaaaacacactggaggcggaatacctaaaatttataaacaggagctgaacaatttctaaataaatagcataccaaatggagcagcaaagtaataaaggaaatacagactacctcaaactcttaaaaataactctcaagtatttttatgattctgaaccagtcatttaaggagaaatttctcttgaaaccaggcatctgcccactgccccatcacaggcccctgcggttgaacctccctttacctccttgcaaaggctctctgtccacacagtgggtcatgtcccaactgggttcttttccattgagttccagttccatccctccccatcagagcctgcatttgcacaggatccccaggtgaccatatgcacgttacagttggggcagcgctggcagaatatcccgtctgtgctccgactctcttctcaggccctgtcctctccccgttgttccagagaggtccagaagaacggcctccttgagtgttagtcttgacagctctggtcaccgttgaaaacagtgcaattactagaccactgtccatcttcccctgagccaggaaggaccctgggacaggactccatcttgcctgccgctgtcacaccagcacctggcccttttaaaggcgtcagttaaagctttgttgaaggagttaatgacagtcacctcctggagcagctttctttttcttttttgtttttttttttttgagacgagttttgctcttgtcgcccaggctggagtgcaatggcgtgatctcagctcaccgcaacctttgcctcccgggttcaagcgattctcctgcctcatcctcccgagtagctgggattacaggcatgtgccaccatgcccactaattttgtattttttagtagagacggggtttctc[140 bp omitted]gagaacagcattttaggcaaaggggattaaacatttacataccctggaggcggtgggcgtcatgatctccctaacccaggaattctcaaactcagcactatggacatttggcaggctctgtttgggggaactgtcctgtgcattgtaggaagtttagcgacctctctggtttctatccctggatgcaaacagcccctccctccccagtcatgataaccaaaaatgtctgtagacactgccagatgtccactgggggacaaaattgccaccggttgagaacactgccccctctccctcagggaatttgtgagttgtacatgctgagtaggtctcctggtccttacccaggagccatggacttacctagcagaggagctggtgagggaagaagcgccccccaccgacctgcaaatttttgccatgtcccaacctgcccatgtggcctggacatgtggaaatgtgtcaacaatcatgacagatctgagagcagtacctgtcccagtgcgcaggcagccaatggctggggcctgcagcctgcgatggtgcctgcgtgagttggtttttttttttttttggagaattcagccgttatgctacagagataacatggtcagtcttctcaaaagaactgctctggaaggagaagacatggtgatcctgtgtgctggagggctgctgtggggtactgggccccagactagagcctctgaggagacccatcaccaaatggccttcctgctccagtgagaagcccctgggccatgtgaagtctgggggagccaggaccagagtccctgagagacatggtctggaaactgctcaccaatgtctgctggatgctttctggacctggggtagtcctgatgggattgagagtaagttcgccagggtcttttggggtgggccaacacttatggtttggtaaattcatcaaaaacaatggatgcagattcagtctctgtgtgcaagggcactacttagagttccaggaagagtccaggggacttagatgtgggtttttctctctaaagcacagcagtctacttgagcagacagaagttaaattgatgagttaaagcagttgaaagcaacaatcagatgtcgcaaggctatgccttgtcagggagtggttcaggcagtaaatcctctatctgccctacctgtctaactatctaactgtctctatacatacccgcttgcctgtctacctgcccacctacctatccatccatccatccatccatgcatgcgtccatccatccatccatgcatccctccctccctccctccctccacccacctatcaaccccatccatccgtccatccctctctccatctatccatccgtccatccatccaccttttcatccttccattcattcatccatccatctatcttctctcttgtttgctttctgtctctcatttgcacaacaaaaatgtatgaaggctttctgtgggctggaggatataagagcaaacgctgtccctatcctcagcaaaccaacacagttaatgagagattagtcccacttgatcagagaattttctgacatgagtttgttccctccattagatggggaacccatggatagttgagagtgcattgtccatctgtgtatctcacatagcctgtagcacagagctgggaacatagctagaacactgtgagtatgcactgaactgacctgacctggggagtgggaaggggttgagcagttccaggttggtgggagagggagaggggcagaaaggcaggaatgttgagaggtaaggagtggccacaggcatgtgttgaaataggacttagaggactttttgatgggggaagaaaataggaacccacctcttgggcctcttttcctactgggtttctggttggaaagtggggcctctcgccctcctatcttccttaccctcgttatgccctgggtctgaaatgcagccacatgtgatgcatccttggtgatcctcacatgatagccaaagaggggcacaaagcttggggtgtctgtgggtgtctggggtacccctggataagaggcagagcctcaatggcctaggcagtgcttctgtccttgcccctgctggtccctcaagagtgtctctgccacccccaacccccttttctctgggctgacctctctgttctcacaaagctgccctttcctccctgtcttgaaatctgataatgaaactaatacccaatatttttgcctccaagagatgcaggagataaacaggaaggcgcaaaggattaaggtgtctctctgaggaaggggctagggacaggccgggagttgggtgacgcctctgtgtggagccgagggatccagatgtgagctgctttgcccaacgcatttttccatctgtgcagagaaaataaaacaaagagaaaagaaaacaagctgtaaaatactttgcagaagtctgagcatgggcatttgccacttgatgtctcctgacagctccaagaagcaggggagggaagggagccctgccttttgatgtttgcctcagagttttcttttgtgtgaccagttgtttaggaagaaccttttgttggcgtaaggtgcatatggaagagagctaccagcccccagcttcctcctggggtgggaaaagtggaggctgagctcccagaaggggctcagaggttagggcaggcccctctggaaaatgcaggagaaggacatttgcctccaagaaggacaggatgatgctgttatcaggcctttcctggtacaagggaggcctgaggaagtgaggcctgggtgatccttccagatccctgtccccaggcaggtgttccagttcctgtgatttctgtgcttgtaagaaagatgtagattctgactgtagtctaggccagctgttacttccagtgataggggtcttttcctctgagccagtggaccaggagccagaagggtagggttcccatcctgggcccccccatttactggctctgtggtcctgggctggttggtcatttcacctctctgagcaggcccctgtcacccttgtctggcagagtgagtccaaagagagtgagtgtgtgcaggcgtgacagtcgtctgcaggagggcaaggtgcagctgcagcctctttctttgcacttggttgaactcagccctgggaacacttgccggaggacagttagcaaggttctgggactcatcccctggtctaatttggcttctggctgctttcagacttcagggcaggagctgtcttttctcctgcatcccacactgctttttctagggccctgtccacctctatttgtaaatgaaatgactaatgggtgagtgacttggcagtgactctaggaagagcacttaaagaagcttgtcataacatcagagagaaaaattaaagaggcacatgtttttctaaagatcacaaattaaagtaacatgtgaatgagaaacttaaaaatatttacagcttatatggcagaaaagacaaacaatgtttaatcctcctgatcactagacagcatgaaaaaagtccaccttatttgaaaactgggcaaatggcatgaacaggcaatgcacaaaaaagaaatataaatagaaaaacaatacatggggaaatgcccaaccttcctagtaatcaaagacatgcaaattaaaatcgtctgtgtgtgtgtgttttctctcagacagagtggccaatattttttaaaaagaatgccgataccaaatgcatattattattttcaagcacgtggtgaaataggagctctcatatcctgctggtaggtgtataagccagtacagcctttcttgagggcagtttggcaatttggtgccaatgttaaaaacatgtagaagggctgggcgcagtggctcatgtctgtaatcacagcactttgggagaccgaggtgggtggatcacgaggtcaggagtttgagaccagtctggccaacatagtgaaaccctgtctctactaaaaatacaaaaaattagccgggtgtggtggcaggcgcctgtaatagcagctactcgggaggctgaggcaggagaatcgcgtgaacctgggaggcggaggttgcagtgagccaagatcacgccactgcactccagcctgggctacagaacgagactccatctcaaataaataaataaataaatataaataaaaatataaaaacatgtaggttcaaaattcaacccagtaattccatctagagaaatttgcactacaacagtcattggagcagagcacaaatatatatgttcaaaggtggttcaaggtggttacctttatgttcaaaggtagttgacatttataatagtgaaaaatgggaaacgacctataggtgcccaaccctgggaggtccttcttttaaatgcctccacttccaactccaagaggcccactatgcatagccatgcaacacagtgccagaggaattttattttttagtttttaatttttgtgagatagggtctcgctctgtggctcaggctggagtacagtggtggctcatggcaacctccacctcccaggttcaagagattctcctgcctcagccttccgagttgttgggattacaggcgcaaaccaccatgcctgactaatttttgtattttttagtagagacggggtttcaccatattggccaggctggtctcaaactcctggctccaagagatctgcccaccttggcctctcaaagtgctgggattatagctgtgagccaccatgcccagcccggacatcttttaaacattgtgaagatcagtatttgacacaagaaaatgttcattattatgaaaaaaaacccccacaaaactagatgtataaaagtatgatccgtgtttgtaggaaagaattaaatagctccacaactgaacaaatgttaatgaaagcctgaaaggaaagatctctgtagcaactgtggttggtagaaataggagtgtgttcctttctcttcctgc[135 bp omitted]aacatggtgaaaccctgtttctacaaaaaaaaatacaaaaaattcgctgggcatggtggcacatgtctgtggtcccagctacttgggaggctgaggtgggaggatctgacaagcccaggagacagaggtctcagtgagccaagatctgtgccattgcactccagcctgggcaacagagtgagaccctgcctcgaacaaaacaaaacaaaacaaacccagcatgtatttctttagaaattccataaaacgtgatttagaacacactgagcgtgaaaccatgttgtggagtgaacgagaagaggccagacctgtgctggagtaaccctggggttggaagcctaaagaagaaggcaggtgacaggcaatcctgatgtggcacaaggaaagctgtgtgaggccatgctgggtgcccacgccaggctggtggggtggagcggggctgggaagtaacattggaaccaagacctgggggatgagaaggaggcagccagataaaacgggagtgtcctgggaggaagggaacagcatgtccagagccccagaggggcaggcgaggggtccttgcacgtggctctagaaacagaccaaagtttggaatcactggagcataaagagcgagaggctgaaggacgagacaggaccagcttatttggagccctgaaggccatgctgagtgctttcgacttgatcctgatgggcgccctcagattggtgcttagaaatcctgctctgggctgagtgtggtggctcacggctatcatcccagcactttgggaggctgaggtgggaaggtcacaaggtcaggagttcaagaccagcctgaccaacatggtgaaaccccatctctactaaaaagacaaaaattagcctggcgtggtggtgtgcacctgtaatcccagctacttaggagggtgaggcaagagaatcgcttgaacccgggaggcggaggttgcagtgagccgagatcaggccactgcactccagcctgggcgacagagaaagactcccgtctcaaaaacaacaaacaaacaaaaagaaattgtgcttctgctgatcatgctgaggggagcctgtgggactcagctcaagccacagggaacctgagggcaggatggtaaggagtgaatgatgtcgggcaggtgactctgggttcaagtggagaccccagacctgaagctggaaatactgatttgggagttgggagcacagagatgatgagtggtgaaggagacagatggggagggtgtggaggtgggcagggaaagggagctgagtcctgagcaatgctcatggggagggaacaggtggagcagagccatagctgacaatgtgggggtcctctccccagagcagggctgggcagcctccggaagctggacaggttgaggtgggaagaacgatggtgtgcaggccccagagtcctcggtggacgagggggagggggagaaggggaggccaggctggcagcaggggcctcagtagtttgctcagctgctacaacaaagtgccacgggctgggggctgaaacgctagacgtttacttctcacagttctgcagcctggaagtccaagatcaaggtgttggcagggttggttgctctggaggcccttctgcgtggcttgcagatggccgccctctggcaacgtcctcacgggatctctcctccgtgcacatgcgtccctgcgtctctctgtgtcctcatctcctcttcctacaacgacacagtcatactggcatagggcccactctgagggccttgttttaagactctgtctccaaatatggtcacattctgaggtactgggggtcacggcttcaacataagaattttgggagaaccttagccatgtattgttacgtgcccaataaatgcttacgggtacaaacaggaggagccgaggaggagctcctggagcacaagtctgcctgcctggctctgctagtggagaagggaggagttgaggggtggggtttcttttgacgctcttgggtgcctgtcctccccgcgcccctgcggctgacacctctctctgtctccccctgcagcctgtaactgcaacctgcatgcccggcgctgccgcttcaacatggagctctacaagctttcggggcgcaagagcggaggtgtctgcctcaactgtcgccacaacaccgccggccgccactgccattactgcaaggagggctactaccgcgacatgggcaagcccatcacccaccggaaggcctgcaaaggtgggctacacgtggcggggcggggggctggggagacccggggaacatcagtcctcccgctccctcctcgcttccttttctattttcttccagtctgtacaaattggcgttgtctgaggtcatctctctctctttctctctctgtgacacacacacacacacacacacacacacacacacacacgcctccctggtatttggaggtgtaagccaaaacaaaggggtgatggagacatggctcaaaggagaagaaaggagaaggtgggatcccctacaagggtgcagggctgcggccgccaacacctctccctcccctccccctcctgggcttctcctctgcacaggtgtgctgcataccagagggctgcgagtcatgttcgccaggcttaccgttgggacaaaggactctctttcaccaaatgcacgcagactcacttctttggatatgtgcgcaccgcccctcactcccccccgaaacacacacacacacacacacacacacacacacacacacacacacgtacagtcacagcggagtcggcagtttcaggggcagggtctcagaaggaacatttaatccatctgcaaatagctttacttctcaggacaaaaaaaaaaattaaaaggagacgggagactattttcgtccactgaagcaagcactaatgttttaactttctgctgtttgtttttctcgtaccaacaaaaatgaagcaatggtcagatgattcagagaagttgatgaaatgccagagaattcagtgatgctggagggtgagaagcggggccccccccaccccacaaaatcttttgggaattccaggaaccagggctttcctgctgcaaaacttgtggcctaaggtcagggcctgccatgaacatggcttcccaagaagatatttacctctgagggctcatgggcaacacctcggcatgggtggggtcctgacctggacttgtgtagacccgaacacaccagggtcccaagccacggcagacaggcccaggtggcgtcctgcaggagagaaacccttctgtggccactgctcagcgtgtggatgaagcaaaagtatcatcttcttaacaggaagtccaccagatgttgggcacttgtgtgcaggactgactgcataatttgcagggcccagtgcaaaatgaaaatagggggcttccagcactttgggaggccaagacgggcggatcaccctaggtcaggacttcaagaccagcctgcctaacatggtgaaaccccatctccactaaaaatagcaaaattaactgggtgtggtggcggttgcctgtaatcccagctacttgggaggctgaggcaggagaatagcttgagcctgggaggcggaggttgcagtgagccaagatcgcgccaccgcactccagcctgggtgacagagcgaaacactgtctcgaaaaaaaaaaaagaaagaacatcttgggggaaaaaaaaaagaaagtaacaaagtagggggcttcttattccagagatattaagaattttgaaacaaggacagcagagtttcaaccaagctggtgcccttctgagcacggggcccatgaatccaacccagccctgcttatgtggaacacttttctcaaaataaacaggttcccaatctgtctcttccaggagaaatccctttgattccaaatgcacaggcataagtagaatggctccctcggtcaagcaaggtgtccttctgtgtctgcggacttacggctgcctctggtggttgccaagagaaacatgaacagaaaggtagctgggctgtttccacattttttaaaaaatcacggtttcaggtgagaatcccccagaagactgagcagagaatgaatgggaaggtggcccaggcaaagggacccgagaaacatctgcaatgccagaaaggtgtgaccaggacaagccccgggagagatggctttgggcttccagagaacatagttggaaggtatccagctcctttgcctgtgcccagagtgtttgttgtctctcttttacagaagaaatggaggccaggggtcttgtaaacagctggcttgcacatagatttcttgggagttcagccaagaaattttacccaacagcggccactcaggtgggcagtcctgtgcctgagagtgagaaggtctgggtgagaaagggcactggtcacttcctgtcatgccagtttctgctgtccaattagaaatgtatgtttcccagagaggcaagaaggggcagggccctggtcacctccacctacaccctgttgctgtggacagggacaagagccatttgcagcctctcaccactcagagtgagagacgtcaggaagccacagggtcccgggaacccgcaggccattctccaggggtctgccactctggctgaatggcatgatattgcccaccttcctttactggtttgtaggagggccagatgcaaataaatgaggatgtgttcttgttttacgagttacaacattgtggccagcctaggtggctgtgttttccttcccagccatggacagcagctgccccggccttggtgggaaccctgggagaataactcacaggacgggaaaacctaaggatggattctactcagaaagacacaggcaaattctactgaagaaatgtggcaggaaagggtgggactcttagtgcctgttgactggggaggaatgacagtgtttcaaggaaactgccatcagattggtgaagaaagacagtgcttcaaggaacttgtcacctgattggtgacagaagactacacttaaaaatatttgccacctgattggtgaggaaagacagggctttgaggtttctgctttctgattggtgagaaaaagcattgcccagagatctctgcttcatgattggcaagaaaatatctactctctgattggtgagcaaaaatttgacccaagaagtccagccatctgattggtgaagaaagacatctctggaaagtccagatctttcccctcagctctttcctttcctggtatcatgctcttatgggatataggacacttcccaccaaaaagagaccctgagatcttggtaggaaccatcgttaggagaagttcagatgctggcgggatgtgtacccttgagatcttcaaacaggggtctcctggtcaacccccttccaccaccaccaccaccaccaccaccaccaccaccaccaccaccaccaccaccaccaccagcacctcctgccttgtattcccagggccagatggttcaaggaaatggttccttgcgaggtttgatatttgacagtttgctctcagaggcttctgaaattttgtagatgtggtgctgcccccaggctctggctttttttttttttttttttgagatggagtctcactctgttgtccaggctggagtgcagtggtgcaatctcggctcactgcaacctctgcctcccaggttcaagcgattctcctgcctcagcctccagagtagctgggattataggtgcaagccaccacaaccagctaatttttgtatttttagtagatatggggtttcatcatgttggccaggctggtctcgaactcctgacttcaggtgatctgtccacctcagcctcccaaagtgctgggattacaggtatgagccaccgtgcttggccagttaggccccatcttttgagaatgacttctggaagccctatcataggccttcaggtgagagctgcacttctttgctttgtttcagatgaatttcacaggggaacagggacaaagggcaggggttcttgactcccaaattggcttgggaacggcctctggggcctctttaccccagactttacagggcctgggcagggggccgaggccacccatatgctgctggtgattggctgactctggaccttgtccagtgtagaggaggggtggacccagacaagaacagcctggagtaagggcatcagattccaaacattactatgtagttgccccatttgggaagtttcgtagcaacaaatttgttgggttctttctcccctcccctggtttagaagcaaaccagagctggcagggttggtgcgtacaaaggactgtaataaacatacccggggaacaggcggctgcactctccagctattcagtgcgatttcacagcactgggacggcctcgttatggtgcaagctgttgtcctatacaaaggcagatgagataaatttctcccttttctccgctgaatggtctgtgaatgatactcgtcttggagtctgtcaaaagacaggaggttttgtttaccatttgtcttctttgtggactttgggggctctttctctttagagcgggcaaagacgaccaaagacgacgttgctatttaaccatttcggccctgcccccattgataacaatattaatttatcattttcccaaaccatctgtgatggataaagacattccaggagtctcccgtgaaccgaattgtgatgagaattaagaaattaaccactgcatccagcatccccatacaaagggcttgcatttccatctcactgagctgcctgtttccttctctcattgtctttccccctttcaagcccacagttcgtgtggttgaatgaaggctaggaaggtgcttgagtcccaagcaagaagatgcaataattagccagggcaaaagcatgcaatcgtcctcacatctttgctaggacgttcttgctacttccgtccaccccttatttctttcagcagctcagccaagagttgctggatggggaggaaatgaacaccacagtcttgccccctctgtttccttgggtcactgtgtgcaggggactccccatgactttctcattcgtgattctccaccttcactgtatggcgtcatcagcattatttgtctgtaacttatgctgtgagtctcacccttggctgcacattggaaccacttggggagatttgaaaatactgccgcctggatcccacccccagaaattctggtttaattaatgggtccagatgcgatctgggcatttggaattggaaaagctcccctggagattctaatgtgtaaccaacactgagaaccacagagaataagaaatgaggatggtgagttgctcttggtggcattaagggaagacttgtaggcagcctagaccccaggtttattgttttgaggagatagattgatcatcaatgaatttaaatgttttttatgattatcttgatgataactgggaggttgggcatttaaattttttaaatttaaaaatcctggccgggcacggtggctcatgcctgtaatcccaacactttgggaggccacggcgggcggattacctgaggtcaggagtttgagactagcctgaccaacatggagaaaccctgtctctactaaaaatacaaaattagccgggcgcagtggcgcatgcctgtaatcccagctacttgggaggctgaggcaggagaattgcttgaacccaggaggcagaggttgcagtgagccgagattgcgccattgcactccagcctgggcaacgagagtgaaacgccgtctcaaaaaaaaaaaaaaatcttactgggcaaggctgggagcttagctagtgtagcctgattaaggcacaagatcagacagtcatcagtgccagatagatagtgcttgcacgtgtgtgtgtgaatatgtgtgtttagatctgatcatttgtggatttattcacagcaaagcaaagttcctgggcccccacccttcttggtcttcctgactctaaggcattgtccacccaccctataaaagcctcgggcaccctttgaatatgtgggtcccctgtcacatttccattacctgtatttatactttcatgtttttttgtggggggtgcagggaaaagggttggtcatctgaggcaggaaggtacttagtggctggagcggctccagctttgaggacagagaccccaaggcaaggagtgggcttcattatggccaggtaaggttagtacctactgggagaaactgacaccttagatactgcatttgggagagagaattcccagtggaagagtttcactccaactgtgatctgtgtggatgcatcttttcccttgggagacatgagcatcacaaaccttacctacgtatttggctccatgttcagtctacagggtatcagataagtctggtgacctctctagacctcagtctcctcatctgtgggattatggtcaggctgctggcctctgaatcccttccagctttgacattccacattccacatgcttcttaagtagtcaacctcttaggagaacttgatacaataggacaattctttgtagcagtgaagtttgtgatctggtgactcagaaaagctggtagagccaggaaattaggtggaggtggtttgactgcagtctttacagatgaaaagagtccctgatcttgtgactcgacccatgtggcgcactgtgccaaacggggtctccctggcccagctgtgctcattccctggacacccttggcccatccatgttttcacctccctggatgtgagttctctgatctctcag[142 bp omitted]catggtgaaaccctgtctctactaaaaatacaagaattagccgggtgtggtggcgcatgcctgtaatcccagctactcgggaggctgaggcaggagaatcgcttgagcctgggaggcagaggttacagtgagccgagatcgcaccattgcactccagcctgggtgacagggcgagactccgtctcaaagaaaagaaaaagaaaaagaaattcctggaggatctccaggggttcctgtgcttgagcagaaaagactcctgatcattgagctccccaagttaacggaagttctgggtttggccagagcgttaagggcattttacttgaggaaatagtgtcttttgggctttttgttgccaggagagcacttatggggccgggggcaggtggcacggggatagtaaacaggtttgggatgcagagctttgaaaagcatggaacttggtgttattcagaccacagttcaggctccacctctggaggcaagacatttactctcagtagcctcagctttcttatctgcaaatgggaagaatagtccctcctccctcctagggctatggtgcagattaaatgagatgatgtggaggatgtccgggcatgtagcatgcgttccatgtatggcagctattatgattatttgtgcaagtcagagaaaacagaaacactagaaccctctgccattgtcagcacacacacaaagcagagacactttctttgaccctctggttgctttggttctttcggtgagtggtggccctcaggagaaccggcccctcttgcttgaagggctcagccccagtgtggacttggcagccaattcccacaggactgggcagggccccaggggttggccctaatgctgttgcacactctcaataaaggatttccatgctttgggagcaaagatgacaagtcgaagggcagagatgtgcccagcagctgcttgtggagacccagcacagagaggtgggggcgggctgtgcacatccagatttggctctggaagtgccaaggaagaccaggcagcatctgagggactccttgactggactgggacttagggctgttgggaggcctgagctggcctgagctgcctcacctgtggcacagacacaggacccaggttcctgctcctgccccactgtgtcgtacagccctattcctgccccaagctcttgtgacacacacacacacacacacactcacacacacacactgggaatcatttgcaagacctgtcttttctccttggctgtaaaacaggtgcaggaagactatagttaactagatcacggagtgtcaaataacccagtttgggattacggggctcccctccccccaacttcctgccgcctgcaccttgatccgaaagtggcagggaaaggataggttgtgcaacttgaaacatttattcttttgtgcctcgttagcaactgctggggcaaaggaaagcatagcttcagaggaggttgacacagacagctgaaatgacgtttggggattatcttcagatttcagtgatcctccctcccttgttaacacagagaatgtaagagtggagagtgcaggggcattggattgcggatgacctaggatgtgaggggactgtcatcccacctgccccctcattctttcctccagatgtgcaggggcagcaacatgcccccctctccccaccaggaaaggacggcagattggcctgagttacatccagattggtaacaagattgtttgttcatttgattcaccacatgtttgtgtaacgcttattgcatgctagacatgggcccttggagcttgctttttgatgggaggttgacaataaacaaagaagaaaaaggaagataatgatggattgtggtgagttacatggaggaaagcagcagggtggaaggagagagtaactgggcaagctgcgctacaaggtggccctggaggggcttctcgcggacaggacatctgagatgagacctggggtgtggggaggaaacagccacaaggaagctgagggaagaacattccaggaagaaccaaagtctggaagcaggaaagggcttggtgggcccttggtcagaagggaagagagggaggaaggggtgggaagagtcagctccttggtgtctggagaggagttgggtcccattctcagagcactggaaggctggaaggagaagagttaactgagtaatatatcaggctcacttttttttttttttttttttttgagacggagtttcgctcttgttgcccaggctggagtgcaatggcgtgaccttggctcgccacaacctctgcctcacgggttcaagtgattctcctgcctcaccctcccgagtagctgggattacaggcatgcgccaccacacctgcctaattttgtatttttagtagaaatgcagtttcaccatgttagtcaggctggtctcgaactcccaacctcaggtgatccgcccacctggtaatcccaaagtgccgggattacagatgtg[186 bp omitted]gtagtcccagctactcgggaggctgaggta[136 bp omitted]gaagatacttgcacatcccacgtctgatggaggacttgaatatcaaagatgtaaatgactctcaaaattcaacaacaaggaaacaaacaacccaattaaacatgggcaaaacacttgaatggaaacatcatcaaagacgggcagatcacaaataaatacatggaacgtccttagtcattagagaactgcaggttaaaactaccatgaggccggaagcggtggctcatgcctgtaatcccagcactttgggaggccaaggcgggtagatcacctgaggtcaggaggctgaggcaggagaatcacttgaacctgggaggcggaggttgcagtgagccaagattgcaccattgcactccagcctgggcaacaagagtgaaactacatctcaaaaaaaaaaaaaaaaaaaaatgtatgcacatgatacaaacccataagactacaccaaaaaaagtgaattttactctatgcaaattaaatgataatagcaataagaagaaactccttccctagggctctctgacactgcgtctttgggcctccttgttccccatctcccatacctcaaagctctgaactcacttagagaccagtctccctgggtcagcactccctcccctcccctggtctctctgtctgccctgcccccaaaagccctgcctgcctggtgtcttcgccgccaccttacattaggtccgctccattccagaatgccctgctggttttcctgtgtttcttcttttggttgctgatccttcactcctgttttggggagtggggaagaaatgggtgcttggacacctctgtccctgacatcatcttctctccagtgtcacctctagtgagggtcccaccaggcttcctccaagaggcctgacacccaccagagatatggggacctggggagcctctggatcctgcttttctctgaagatgctggcccttgctgactctttggactgtcctcactgcaccaagcaagctgctgcagtcgacctccctgacctccacagcagccagggagcagcctggcccacgccgtggggcctgtccacagggcctcgtctacccctacgttctttgtggatggcgtccacctatgcagactgatactactcaaagcagagaagactgtctcccccagcccaggagggccacaggcagatgcagccctttggcatgagctgtaggacttggagtcacatggagcctcacaattggctccagggttcagccctccctggggaaacttggcaagatttccacattcactgctggggcaatgtcccgggattcagggcagggtgttttctctgtctgttgcattcctctgtcccttggaagtcttgtgaggactaggaagggagtttcccatcagactttgggagggatgccttcagcacttgctgtgtgagccctttcttcttctggactggaacagagggcaccccctgcattgctgtacaggtgaggagggggctgctgatggggccggcctcccttctctgacctcgtgccagccttctgagggctcttaggacctgcagcacttcctgctcaaggcctctgccagtgcccttttgagaacagccctcagatggtctgtgagctgtgagacctgttgggaatcagagccagcaggggctctaaagatcatggaagctgagagctgctctgctggcctgtgggggttttggggaccctcagagacatggcctgccatggagaaggttttcctcttccagcaaaggtggtgacttccacagggagccaggggatgaaagagctgattggtggagtggtggggcagtcttccttcccatgagtacaggacaggcctaggagggtcctggagaagaagatgcttacctgaggctccacacaggtgtgttagtcagtgcaggctgcaaagtgcctcagactgattggcttaaacaacagaagtttatgtctcatagttctggaggctggaagtccaagatcaaggtgtcagcagggctggttttgttccaagaaacatctgctccaggcctctttccttggcttgcagataaccgtcttctccctgtgtcttcacagggtctttccactgcactcatctgtatcccgatgccctcttctaataaggacaccggtcatgttggatcaggttccaccccagtgacctcactttaaattaatcagctctttaaagcccctatgtccaaatacatccaactttgaggtactggggattagagtttccgcatcagcattgtgtgtggcagggagtacacagtttagcccatagcacaaggtcaggccagaagcggaacttcaggactggccagaggcctgggtggtggctgtggtggtgtctgaagtgagggtggggctgtggctgttctgtctcccctgtcctacctgaagctgctccagaggagctcatgcccagctggctttcctgtcctctatgggcacgtggccttggatcactgccatttgaaggtcctgcctgacctcaagagcccctggagccagagtcctcaggaaaagtagccagacctctggataggagcccaggacagacttctggaaagccttagtatgtgcttcagtggaaagggtgccaggctcaggagtgtgtctcctccctggcagagcccaggagccttcagggatcccttcagagagtgtcagagggagtgggaaaaggcagctacttgggcacaagaaactgacgatgagaaccacctgccatccaggtcagctttgccagggctctcggaagtccctgggtactccctctcttcaccgacaaaccaaatctcaacaagattctggcaccatgcaggtgggtgctggtgcaggcagggccagcagtaagggtgtacggaaggcccggtgtgccctgcaacaggagccctttcccctgccctcttgccaagacactgaggaacggcagcagaaggggcgatggtcaaagggtgggggctgctgccctggttcctttggacccagcagggaggcaaaaaccttagcctgttaagttgtaagtcacttcagtgggactttagagggagacctctgtccttacaggtgagccaccggtggtccagagagagaaaggcactaacccagggtcactgggagggtggggcgccagacctggatcccctcttacctgtctgaaagcgcgtgggtcacctgagctgtctgtccctgtctcatgacccagagcaaggaccgcgtgggttctctgcttcactgggaggctctccagcctgcggtttcatgggaaacctgatcttgccgtgttctcagggacctgggcttccgtctggcctcacctttctctttatggaaaaaatccccgggttgattgtttcccatggccaggtgctgcctgctccttgcacacggggtgacctgccatggaagggattgacctccctctgaaaaaagtggctgacttccagggacatgggagccacccagcggcttcctatggcggaagatgttctgacccagaccacgttctcagaggaattagggaggctctctctttgtctccctcaccagacacccccaccacctcccctgcaaaggaaaagacctccactcacctaactgccaccttctccccagctcactccacacctcccctcccctgcccccccgtggccctgtgtgtctgtgtctgtgtgtgtggctttgtggatctgagtatatgtctgtgcgtgggtgagtttgtagataagaatccgtgtgtttgtgagtcaatgtatgtagatgagagcgagggagggagaattagtaggagtctgcttgtatctgtgtgtttctgggaatatgtgtgagtctctgtgtgttagtaggaactttgatgtgtctgtgtctgtgtatatttcagggtcaagggactacagcaggatgcttttgacttcctcttcctcaaggccagggcctgagtcttcccttgggctcagcctctcttcctttggcactgccagtcacattctccctttccaggccatagtatggcattgccatctgtcaactctccctacaccttgaaactcagactttgcacagggtataatgggggccatctcgatttgtgaatttttaggaaaagttctttgggtaatctcctttggctggagattgagaatgaattccaggcaagtctgttaggattgcactgggtacaggtaacagaaaacccacatcatattataagataggagcttatttctccttgcagaacaagaaatacaaagggggccatttagaaagggtagttccctcagagatccaggctctttccacctctccgcacagcccccagctttctcctgcagttgtcttttctggtccctggcctcctctgtgctgtcacgcgcatttcagagggctgtcgcaaggaccaagggattcgacacgtatgagagagtgtggatgtgctaaggagtttgcaggagttggcacggggcagctactgctgaagaatactctgccttgggcagcccctttgggaccctgattgcctcccttcctagaacaatgatctgctggtggggaaacacaagtcagcccgctgcctccataaaccagaggaataggtcagattcttgcagaatctcagaaagatttggaaacccaggagcaagcatcagctcatgttgaaccaaagagtgggcccttaggaagcgtctgccgcacccagcagacacagtggccctgccattaccggggacggccctcactccgccagacctcagctggtgccagcccaggcagctaagcgggtcaccggctgtgggggagaacaatgcaccatcctgactccacccagagtctgctctgggtcggccgctgccaagataaagacaacctgggccaatgagggtgtccacgtgtgacttggctctgaacgtgcagtgaccgagcaacctttggtgacctcccttcagccaaatccaaggatccagaagttactggtgcacagctgtgttccatcagctcggaggggagaatgtcttggcatgaatcttaggattaccagctggctaagggaggtcagccggcctgaggccctgatgctcacgcttgcatcaggggcttcgaagacagtaggagcctgtgctgtggccctttgcattcgcacggccgacttagaggcactgcccatgctccatctcccttcctaccatggacgaatttaagagaccatagggaaaggtcagagaccctctccagcctcccctcctcgccgccgcctcttctgcacgtctccatgggccgtcaaggctggatcttttcttactgtcgagagagacaaacaacagagaatgaacttgaatttaggg[140 bp omitted]gtgttaaaaccccatctctactaaaaatacaacaaaattagctgggtgtgatggtgggcacctgtaatcccagctactcgggaagctgaggcaggagaatcgtttgaacccgggaggcggaggttgcagtgagccgagattacgccattgcactctagcctgggcaacaagagtgaaatccatctcaaaagaaaagaaaaacaacccagcattacttctatctataagaagcagcagcaagactggagcagttccatcagcctacaggcagggagccctgtaggctgcccccgtgccagggcctgtgcccccaccctcctcccacctgatgggggcacccccagccctgggaccctcactctgagtgattccaggaggttttgcatgtccagacacaacttcaacaaacaattcctcacattcttctcttctccaccttcctccctccctcctcttcctaattctcctcattggccactcctgggcccgaggccggctgggctgggagaggtcgtgttttgagccacagactcccgtgctcacgcccagcagtgcttgctgggaagttctaatctggctgcttcagagcctctgctctcacttgcattcttgggttttttggtccttttggaggaggaacagattagcagccacgaggggacacctggaattgctgccggacgccttactgcagacgactccccacttccagcctccaggatggggcatgggcaggacatttgccttcttccttcggtgttccccttccccaccacactctgaggccaccgcctagcttcagggaggcaggacttagcagggaacgctggtgtcctgtgcctacaggtatagctgttcttgccctgagcatctgtgttggtgggacatcctcctgaggtcctgtggctactctcttaccagaattggcttcttgggacacagcgacagagcctccgtgaagcatgacagggtgggcaaccccacctctccaccctttcaagcccaggaggagggtggggggcctgctctgtggagccgtagttgctggcttgagaatcccgggccttgcttcagctcccagcctggccgttcccttcctgtgaggctctgggagtttcctttacctctcccgtctttgtttgcacatttaatcagggctttaagctaaatgatcaccgtgaccctctctagtgctacagtttatgggttttgtgattcagaaggctgcctggctgcaaagtagggtcaggtgttggggggcagcagctgggggagccacccctccctgtgactccctctaacctggcaaaccccagagcttcaccaggcctcaaaccccactcctcccatgccctgggttggcaagaaaacttgggggcagggagctggttgaggacagagtgaaaacgcataagccgaccctgtcaagggaaggtgtatcccccgatcctgactcctccacccaggcgtgatgagggctacgggctctgccttcccgagaaggtatttgaaagccttcctcctgggcttccaaagggcttctgcatttcactttcctgctgccaaagcagtctcttcaggtcggtccattttggtttttattctccgtttccaggtaggtgggtggccagtgtcagagcttccggagtgcgtttgggcttggctgggcctgctccccatcgctgctcttcctccagggcagggtccatggaggcagccctgggtagggaaggctctgcggggatgcactggccgcttcccccttgtctgaccctcccattttgtgttctctgcagcctgtgattgccaccctgtgggtgctgctggcaaaacctgcaaccaaaccaccggccagtgtccctgcaaggacggcgtgacgggtatcacctgcaaccgctgcgccaaaggctaccagcagagccgctctcccatcgccccctgcataagtatgtgtggggcaccctgcttttcaagtctctggctttgtgggggacagtgagcttttgaggatgctagtcactgatgttcagtgggttccttttttggttggttgagtctcactgtgtcgcccaggctggagtgcagtggcacgatctcagctcactgcaacctctgcctcccaggtttaagtgattctcctgcctcagtcttccaagtagctggaattacaggcgcaagccttcatgccccgctgatttttgtctttttaatagagatgggatttcgctgtgttggccaggctggtcttgaactcctgacctcaggtgatccacccaccttggcctcccaaagcgctgggattagaggcatgagccaccgcgcctggcccattcagtgggttctgtcttcaatgtgcattcctgcattcaaggcctcatgctcagtgagtccacgtgggagaccccccaagctcatagagttcttgcagaagccactgggggctcagcagagccagcctgtctgaggctgtctatcctgacaaacactgagtctcctgtttctggggaaaagcaagcccctctcctcagcactggccccattctcactgtccacctggaccctggatctgggtgggcccattccaggagtgctgttgtcactattgccggaatgccggcattccccctgcccctggtgggttcagaacagaaaggacggacagcccagggccttcgagaggagctgggcagggcttccatgcacggcacctgtgtccctaatgaaggatgatagcaaccctgaggcgttccgtacagctgttcgcaggggctcgctaatagcaaatgaccagggtccaagccttggtagagggggctcagcacccatccagggcagagcaggttgaaatagcttcacaacaacctccaattgtcagcctcacagtttgtcaaaatccttctgtccatccagattctgcaaggtgaacatttttagacagctgggaggaaatctggggttcggaaaacatggggggaaagctgaggtctcccgtcagggaattaggagttctcaggttgctcagaaatggttggaaccaacatttcaaattcccaggtggaaaaatcaagcctagacacgagagctggtgtttctgaatcagaggctgaagccttgggaactctcatttcccagcctgtgccttctctcctcctctaacaaagggcgggctgatgcctggcgagagcattgtccctccttggacaacctggggctccatcctggaattttcgcttgctcttcccgagggaagagctacaggtgcccagacagtgcctgggggactcgtgccctgttttgtcccagcttgggcagccatgggccctgtgtgtgcatcccagagccaggctgacctcaggcactgaggttgggtggtcacaatgactctgtggccattggcttcggctccatttgtggacttgcaggattagactggaccattcagatgttgcctccaggatgttcctgctgggaccaggtggctttttagggccagcttcctaataacccattgtgacagggcacctatggtttgttgttgctaatacagttgcctgggagcaagatttgaccccaaattgagggctgtgtcccccacttgttcttcctaaaggagcagaggatgcctccggtgcctctcagatttgcccccggcctgagtagcccatgtccatccaccaagcctcaagtcctagctcatctagaatctagggagtcagagttttaccgcaaagaatcagatggtggctagagtcagtggggttcatggtcactcaccaggggaagtgagtcccttcctcttagggactcctggtccatggtttggccttgttcagaaagaggaagcctgagcttcagtgccaggctgctgaaccgatgagcagtggggactggctgaaccgcctctcttttcttgagcacagggtggggtctgggaagtagtaggaaccaactgctttttaaatatttattattatatatactttttgagacaggatcttgctctgttgcccaggctggagtgcagtggtaccatcatagctcactgcaacctcaaactcctgggctcaaggaatccccctgcctcagcctcctgagtggctgggactacaggtgcgtgccaccacgcctggctgatttgttttatttcttgtagaggcaaggtcttgctttgttggccaggctggttgcaaactcctggcctcaagccatcctccccaaacgtgttgggccccaaacgtgttgggatgacagatgtgagcccctgcacctggccagagtgctatattagatagagaataatcaaaacgatcacatgcttttatgaggcccttggatctgcactctcagtcccattctgcccattaagaaaatgccttagcgcttgagatgtgaggctgtaggaacctgggccgtgctgccaacacttctctgcacgtgggagaaacctttccctttgggcaggttcccagccccttgcgtgctatcctgccatggatccttctccacctgtgagttgagcttagagatgagcagggcccaggtagccacatcacgatgagcagagtggcctggggaagcctctctccatacccgcaagggtggagctgagttgacgccaggcccagggggtgggggcaaggccaggctctgtgttgccgcctcactcctgccttctctccacacccccctgccaggtgaaaggagaaaaacgccacgtgcccaggatgccgctgccagcttctgctcttctgacttttctcctcttgagccaaggagtgggaaacggaggggagggtcccaggaagttgggaggagtctgtgctgggctcattctaaagtcaaaaaatcatgtcgtcttaccttgttttctctcctcccctcgcccccgtcttgaacctcacaaagagatccctgtagcgccgccgacgactgcagccagcagcgtggaggagcctgaaggtaaacggcccccttcgcttctcatttcccgcttttgctgggtggtggggtggtggggtgggttaatggggaaggggcattggaaagcccagactcctctaaccactgtccgggctctgctccgtatgagtggcatcctgggttgcattgaagaagctggagctataggacactattttgtggctttccctctgagaatcaaatggaggagattttaatgatgcctctctcccaagcctggaaccctaaaaactgagctccttctacttgtccaccagctgcccgccagcccaacaccttccaggctgaggggttgtcactccttcctggggctgcagagaaggaaggagccagatgctggggatacagaaggaggcttgggcacagggtcgcacaagcagaatgcagggggcccaggagctgggcgtgggggagaatcacatcttcattttcattcgcctctaactaaaaatttagcatttcctccatggcaaagagaggccgcagaccgcagcatgcggccaagcctgcaccgtggtcactggcggaagtcacagcggtttacacatcacattctagctggtgcagatatcataaatatcgttcatgctggttattgcttctcaaaacgacagaagttactagacctgctgctagatcctgatttataatcattaataaagaagcactcgcgtaacgtaaccataccatcaatctgggtctttaaagatatttgggcagcagcatttcagtattattaatttcctttgtagacctgtatattttattttagcatggggaaatgtttgtctgaggaagggtccacaggcttcaccagtccttggcacaagaaatgttgcatagctctggctgtcggcactcagagtgtaccgagccctgccagatgccctgctgagagcatctcaggcctgcacccagagtcctggtcctgggatcacacaggacttttgtgtactggtacttggggtagaagagggcagaaagtgacagtggggcaccccagcatggacattcatgctggtgctggggactctttgcctcccccagaaaggactgtagcgagggatgggggagcttgcaaacccatgtggccccctgaatattttaggatacagactggattttggagagtattggcagtgcgctggaaacttgagggaagacagattcggcacttgcacaggcatggtccacagccagcaaacaggaaaggacagaaatgcgtttcagggagtgccagaggcagctctgggaaagccaaagacagttgagtcttgcgttgtttgcagagcctttagggacttttggttgagccccatgcaggggaaatggcgaagagaagggattgaaggaagcagcatgacagggagactggatgacagagctaaggtgggagatgaggaagctctctctgtcacagcacaattcaaaggaacatcctaaattacttcagctctaggggagagcagttttgaaggtagaagacacttaaatgaaacttcgattcttgctctctttgatgtgacatttgtccttgcctaactgagactcacctggacaagattttaaggctgtgcacaccgcggggggctgaggcttccgagcaggggctgtgtgacagctcatgcaagggcaagacagacctcaatgatctatctctccatctccgtctttgtctctcactccccccatttctctagtccttgtagcttgactttgagtttctcacaaacccacaaacccttgattttgaatttttccccttccaagtcagaaatgggcaaatggggaaaaatgtggaggggagggatctcatgaggtttctacataggctacaagaagctggtataaaacttccgaggttcttggctccgccagacaaaagattccggagcagccgcttataaacactggcagcctccttttttgaaatgtcttctttgagttgtttaacttttcggactgcttttgattttgttactgtttatttcctttcctcattctgaacctttaaaagcatggtttaaaccgaagcgagcagtaaataaacacccttataaaatatcttcctcagagagaggctgagtgagcaggttggaagcctgtagcaatgtttgtagctttgaccagacctgcgctgccctactctgggggtcctcggatgcccagggtgtctgatgctctccccagagaaccggagccatctctgggacacaagtgctggaccgtggggcctcctaccacagggaggctgggtatgccttgtctcagcgtctgagacattgcaggcaggaggccaggagggccccctgggaagcggggcccgggagctcagcgctctcaaacctgtccactcttgccgtgtttgaataggggaggcctctgtgccaggctgcctgagaaaagcttgtttacttttgcctgcgtaccagaggagaattaataagctgagaatttgttctgaaagctgatggacataaccttcccctgaactcatccccttgaagggccagctcactcagggaatgttctttacctgctcacaaagctagctggtaagccgtcatggggcagggaggtgaggaacgtagtgtctgtgggggtctggggccgggtaggccaggagggaaacagggaggaaaggagagagggaccacccactcaaaaagggcatggtacccaaggctcccctggcactcacctacttgttggttgtagagacctcagcactcaaggaaaaaagacacctgccttctctccctgtaccaccccttccccacctatcaactcaaggggagttcttgatttgcaaattgtttgtttggttttgtggtggccatttggtttggtgggaggagtctggtatggagccaggagacctggggtttgccctgcactgactctgaggacttggacaatgcaatggcgtctcctttctgccttctggaagaatgaaggggtggacccagtgctccacaggcccttccctccctggctggctgtggcaggagtgagctcctcctgctggggtttcctcttcagaggcacctgcttgttctcggtccgcccctgaggatccacttctcccacatcccaggcagaggcctgtgggcggaggtgctggtaagtatttagcaactgcctggggcaggaggtggggccaatgtgtagcatctgccacttcccttggtgtcaatactccctccctggctggtttctggctacccaatgagatgtcattgaatgtgaagttgggagaggtgcatgactggccctcagagcccttggcagctgattccacctcaccactgcccatgggccttccagcagaaacagagcaaagaggtccagaggcaagaaaggctgcctttgatggcctccttggtttgagggatcacagctgcctttgcgtggaagctggacccagggctctggggttacaggagcatggagccagccaacttctgggctccctccacctcccaacagggatcccgggtcctctctcctaactctgtcttcacgaggcactcaccccatcggggccttacctggtacctttggctaactgccccagcagccccagcctggggtgggagtggctgccaagggcacccttgcacattaccttgatggtagtctgaaaggaaaactccacagagcccggcagctgaacctctccgagaagctccacactcaggtgctaccaggcctgtgtggtgggggtgggggttgaccttagagaagtcacttccggtggcctctcggcacctccactttttcacggaaggaagttgggtttatgtagacctgcagcctggataagcatggattattctcttgtttaggcttttgtttgccaagatagggaataggttgggtgaatacaggaaaatgagttgatgggacttgaatgcggcattagcgaggggttgtggggagggagaagagggagaaaagggcactaaaatgggcacctgagggctacttgatccctctctcggattcttcatttgtgaaatggggtaatcgcaaccctgccactagggctgttgtgaggattaaatgggatgatctcagtaaagcctgtgactcagtggagggactgttcaaagttcttgattaaaaaaacaatacattgacatgaaaaatacaaatgccatggtataatgagaggttgagccagcttctccatccagaaaggcgggattggggtgggagttgctggcgtgaggacaggcgtggagagtcagcttgattgggcttttgaagaccttgggaagtcacaagttggactgcccgaggcagggagcaactgaggcaactgcatggtgggcttgtcacagccttccagcagctcatggtagagcctgaaccaagcagagaggtaagaactagaaaccagttaaaggtcaagagcttcacttcatgatagccaaaaggtggaaacagctcacctgtctatcatcggatgaacagatacacagaatgtggcatatctatacagggactattatttagccataagaagaaatgaatggccaggtgcggtggctcacgcccataatccaaccacctcgggaggctgaggtggatggattgcttgagcccaggagtttgagtttgagaccagcctgtgcaaaatagtgaaacctcatctctccaaaaaaaaaaaaaaaaaaaaaaaaacattagccaggcatggtgatgcacacctgtagtcccagctactcaggaggctgaggtgggagggtaacctgagcccaggaggttgaggctgcagtgagccgtgattgcaccactgtactcaagcctgggtgacagattaagaccacatctcaaaaaaaaaaagaaatgaagttctgacatgtgctacaacacagaagaaccttgaaaacatcatgctgattgaaagaagccagacccaaaggctgcatatcatatgattccatttatctgaaatgtccggcaaaagcaaatccagagacagaaagcagattagaggttgctaggggccgggcagcggctgtttaataggtacaggttttcctttttgggtgatgaaaacgtcctggaacttgatagtggtgatgagttgtacaatgttgtgaacagacttaatgccattgaattgtacacttaaaaatgctaaatctggctgggtgcagtggctcacgcctgtaatcccggcactatgggaggccaaggtggacagatcacctgaggtcaggaattcgagaccagccttaccaacatggtgaaaccccatctctactaaaagtacaaaattagctggatgtggtggtgcatgcctataatcccagctacttgggaggctgaggcaggagaattgcttgaacctgggaggtggaggttgcagtgagctgagatcacaccattggactccagcctgggcaataagagtaaaactccatctcaaaaaaaaaaaaaaagagtgctaaatcttatatatattttgccacaattaaaaaataaaaacaaaaaagtcaagtgctttgggtcagagtccaagggtgaagtgagtctgatttgtctggggctggggtgagtgtcctggagacaaggcactggagcataggcagcaatgggggacatgcttgtcttcctgtcgcctcactgggaacctttggaggggatggcggaagtcgtctgtcgtcttccagccctttagctgtgggtgtatggcttcgagttctggctgcacagcctgaccctctctccccttttggagtcatcttagaaggatctggttccttgagtcccaggtagggaggcttcagtgctcttggtataggagaaagggagctgtggggtccacagaggagaccactgacaggaggggggatcactggagaccgtgcagacagcccaggccactggtaaacaggcccagtaattgaccaaggcactggtttcaaagggtggtatgaagcgggatgttaggctgtcccaggttagccattagataaatgaccagtgaagtcattaacacaccatcagattactgttatcccgagagaagattagaccagacccagaataaaagataaatggattctggctcagggaaggaggagacaacatttatatacataagatgcttgctctgtgctaggcactgtttcaaatgctctacattattaaccatttaatcatctcttccacccatggagctaggtactgtcatctccccccgacccctgttttacagaggagtaaactgaggcacagagagatgggtgagccctagcaagcagcatcactgggatcccggccgtggttgcctgggcgcagagtctgtgagtgctgttggccaccatgccattcccacagaagttatgtttttgtttgtttgtttgagacgaagttttgctctttcgcccaggctgtagtgcagtggcacaatctcagctcactgcaacctccaccttcctgtttcaagcaattctcctgcctc[134 bp omitted]gcctctcaaagtgctgggattacaggggtgagccaccatgcccagccaaagttatgttgtttggtcaattttagataattaaaaaaaaaaatcctatgtagtaacatcctactaggaaagaagataaactcaagtatccactgaggggtgacctgaaaccaaagagacatggaggggcagccagtcaaaagccactgccttttacaggtgccagttaaaggggttctggtgagtgtggttgtttggctcatggagctggcatgaccagggccacaggtggtgagcactagagaacagttagcagagctcagacccttgggtcacaaggtagccagggtgagacagggcagacaaatcagctaatcccagaatgggtgagcataaagaaacccaaaacccccactggcaaagaatcagccgaagattgttagaactaataagagaattctataaggagccgttaaacaattaacgtacaaaggtcagcatggcctgtagtaagtactcagtgaatgcatatcagttttatgataatggaaacaaaatctcaactagaataccagtaaaaatatgaaacacagaaataaatgtagcaataaagtacagcacatatgtaaagaaaagaacaagacttttccaaggaacatgaagaacagaagaaaaggagggtcttgccacgttctgagaagacaagacccaaaattgtaaagctatcagttcgcccagaaataatctgtatattagcataattctagtcaaaatcccaattacatgaaacacgattcctaaattcagccagaaaaataaatgggtgaggattgccaataatttttttaaaagaagattaatggagggtgatttgccctaccagatatttaaagatattgtaaacaggattatttaaatgagtgtggtactggtgtaggaatagagagatcactaatgctgagtagaaagtctagaaacaggccaggtgcagtggctcacgcctataatcccagcactttgggaggccgaggtaggcagatcacttgaggccaggacttcgagaccagcctggccaaaatggtgaaaccccatctctactaaaaatacaaaaatgagctggacatggtagtgagcgcctgtagtcccagctacttgggaggctgaggcacgagaatcacttgaaccttggaagcggaggttgcagtgagccgagatcgtgccactgcactccagcctgggcaacagagcaggactgtgtctggaaaaaaaaaaaatctagaaacatactcaaatgtaaacataagaacttagcatatggtaaagttgtgactgtgagtcagtgcagaaaagaatgaatcaatcagtaaatggtcctgggaaaaccggctatttattttaaaataataacaaaatatgctgtatatcaccaatggattaaagatttatataccttcagcatatgtccttaaatgttctagaataaaatatatatgaatatcaatgtaatattgatgtgaggaaggccttttagacatgacacaaatgtcaaaaagcataaaaggaaagattttgaataaataataagcggagccgggcgtggtggctcacgcctttaatcccagcactttgggaggccgaggcaggcggatcatctgaggtcaggagttcaagaccagcctgaccaacatagtgaaaccccgtcactactaaaaatacaaaattagctgggcatggtggtgcatgcctgtaatcccagttactctggaggctgaggcaggagaatcgcttgaacctgggaggcggaggttgcggtgagccgagatggtgccattgcactgcagcctgggcaacaagagcaaaactccatctcaaaaaataagtggaaaacttctgtatctcagaaatctctataagcaaaataaaaggcaaactaaaagctgagaaaaatatatgtgacatggttgaccaaaaagattaatgtcctcaataataaagaacttttacagttcaataagagagatatcctaatatgaaatcaggctaaaaaagtgaactagaaatttagagaatttgtacaaatggcaatatgcataggaagcattaaacttactagtaataaaaaattaacaagaatactcttttaaaagcttattagggatggagcatgtggctcatgcctgtgatcccagcactttgggaggccaacgggggaggatctcttgagtccagaagttcaagaccagtctgggcaacataatgagaccttatcgctactaaaaaaaaaaaaaaaaaaaaaaaaaatccaggggtgttggcacatgcctgtagtcccagctatcacgccactgcacggcagcgtgggtgacagagcgagaccctgtctcaaaaaaaaaaaaaagtattagagattagagtgacactgtttggaaaataaaaagtaattattctctgtgttgaaaagggttggggaagcaggtacccacctactctggtggtgggagggtaacctggtgccacttttatgaagggtaatttggcattgtgtatcaaaaggtatccatgaccccatcagttcaattctaggaatttagccaaaggaaatagcaatgtgtgccaaaatttagctacagagatgaatattgcagcattgcttataataacaaaagagagacacaacctacgtgtctttgagtacagcttgagttactcagcaatgggatagccatataatgatgtggggagaatatctaaatggaaagataaaatatagtgccaggtgacaaaaacaagtgacacaacacattacacctgaagaattagccatatcggtggaaagactgctgtacaggagcatttcgcttagtttctttctgtttgtagatttcagtggttctcaatcaggggctattgtatgtctggagatattttgggttggggagggtgtcgctggcatctagtgggtagaggccagggatgcagccaagtatcttgtgttacgcaggacagctcacgcaacagagaagtacctggccccaaatggtgatggtgccaagggtgagaactcccgttatacagaataaaacccacacattctctccaaaagcattaaggagagctggggcagcaccgggagacaaacccggctcttttattagttatgcaccatgctgaactgaatgcagctgacggtttagaaagctgtttcctcggccgggcgcggtggctcacgcctgtaatcccagcgctttgggaggccgaggcaggcagatcacctgaggtcaggagttcaagaccagcctggccaacatggtgaaaccccgtctctactaaaaataaaaaattagctgggcatggtggcacgcgcctgtagtcccagctacgcaggaggctgaggcaggagaatcacttgaaccctggaggcggaggttgcagtgagccaggatcatgccactgcactccagcctgggcgacagagtgagactctgtctcaaaaaaaaaaaaaaaagaaaaagaaaaaaaagccgtttcctcaagtcagccacatttcccatgtgaccatgttaaaaaaggactgagcttttatgtgcctggtcatttttccatggtaaaacttagcacaacctaaagtgaaatgtaccccaaattccaatttgtactatacattagtatattctgaattaatgtgattcaactcattataaactttttattttgaaaaatgttgagaagtagggagaaaagcatgggggacagttacattctcatcacccagacttaggaattcacattttgcggtatttgtttcaactaccttttctgttaaaatatttgtaaagaagtttagacgttatgacatttcagccctaaatattttggaatacacctccaaaaactgagaacatctcaatgtcattattatacctcacaaaattaacaatgcatttcttaatatcatttgatacatagtccatattcagcacttcttggttctcccccaaatgtctcctca[138 bp omitted]catggagaaaccccgtctctagtaaaaatacaaaattagctgggcatggtggcgcatgcctgtaaccccagctacttgggaggctgaggcaggagaatcacttgaacctggaggtagaggttgcagtgatccaagatggtgccattgtactccagcctgggcgacaagagtgaaactcc[135 bp omitted]atagtgaaaccccatctctactaaaaatacaaaaatcagctggacatggtggcaggcacctgtaatcctagctacttgggaggctgaggcaggagaatcgcttgaacccaggaggtggaggttgcagtgagccaagattgtgccactgcactccagcctgggcaatagagccagactctgtctcaaaaaaaaaaattatgcaatgttgtgatatatgaaggactctatttagaaatgcatctgggtgccattcctgggctgctttcgaggatgcaaagtggcaatgtaagatggaaagtgttccctgtgtggtacatgctgtcactgttaacttcacctaccgttaaagaagaggcactgccacgtccagtcctgtggcttcgtggagtgagtggtggggtcagagggtgtggaaacggaaagacattcagcagttatttcaggtgtttaaaccgtgggattctcagtctcagcactgtcgacctgggggctggagatctctttgaggtggcagctgccctgtgcactgtaggatgtgaagcagcatccctggcctcttcctactggatgccagcacctaccctctggccagttgtgataattaagtgtcccttgggggacagaggagcctctggctaagaaccactggatcagacccagattttctgacatcagcccaggttgctagaactctggtccaggaaagaaagccagagcccaagccaaggggccgtgggactcttctagtggggggacctgctcattgcccctccgccttgagatcagacatcccgtgtgtattaggtcaaaccgtgcggaattgctgctgtatgtgaccatttcagacccacaaaaatggcaatttcctagagttcagcttaacatttacttccccttggccaggagaacctgcttctgagcagcctgcacaagtcagtttcccctctcttctttctcactctctgctgtctgtctccctctctctctcctacaccccctacccccaccttcctcattccctcattttccctggcctcttccccaccccctcgtccttttcccctctttctccttttcgggacctgcacaaagggctggggcagaggtcaggctgggggtgaacagggccaggcgagctctaccacccctccacccctccaccctgggcctccatcaccccaaggagcacagagaagccatttgcatggtgggtttcaggagccccattgttcccctgtctctgggcctttgcaggtggagctgccaccagcctcgaggaggataaagggatgagctgggaggccagaggagcaagtgggggcggaatatttagcccttcttgggagctcttcccactgggggatcaaggagcatggctgatgggaacgggacaagtgacaggtgtcagggagagagaggatgggagtccttggacccacctccatgtcacacagctgtcacagcgaccttgctggcagaggctggcaggggtggggcagtgcaggctgtggagctaggctgaggcaggggtggatgcagagaacccccaggtggcccaggctcagagctcggcctgaaaccccttgcagattcctgtacaggtcctgggctgtggtgggaggggacttgtagcaactgggtcacacctggcctgaggccctcagcgtacagactctcctgcccctattgcagcgggctcgcctggcagaatcttcacagccactgaactggggtgaggaaagcccccctccagccccagagcaggacccacagtggtccctctaattacttaaataccctgccagatctaaaactgctccagacttaaagaaataataacaaccatcactgcaatcctttactggagatcatgggttttgagtatttcaccccactctagctaaagcattctgcaagccatttgttagtcctggagccagtcttctcggtgaaatgaaggagctgggctaaaggatacatttggccccttctcagctcaaaatcgctggggcctgggaaggcctgctttggaggccactttggccaccagaccccatctgctgtcctcccctgtgctgccagcagctgggcagggcctggggtgcagagccagcctcgtgttctggggcacagcacccgggcaatggggggctgcctgggaggttctttcagggctgtgttgaagaaattgtggggaatttgcaccaaggagggtgctcaaccctagggtaggaaagaaaagaggagaatggattggtggggacattgtttaggcagtcgccaggcagccttgctcttgtggacatagaccctcagagttggaaggagcagcacagtggtggtgtggcagggaggctaccagctgccgcctcctgtggctgtcgtgattatgctcagactgtccccagccccacctcctgctgagcaggattttcctctcggcagctctctccctctgctcctaaagctgtttgtgcggccacacaatgcaagtctcctgcctctgccctggggcatggttcatggaccttgtctttgccatccagggcagggcttcaggcttcagtaagggcagtagattggtgtctaggagggaggcggccagtggggcattgcccctccccattcccccctccagagaggtcagtgccttcctagagaagagtgtgacaagtgtcatttgcacagttttgtggtctctgcttgagtacagtgtattgtgggattaaggaaaggagaaagccttctatttgtagagatcaggaatgaagcagagatctgaaattatttgcacagagaggcatgtgaaacttggtggtgttggagccggctcacacctgttcacacctgctcccactggctcacgagggccgactgtgcatctcttcccaattctgcattcagggtgtcctgctgggagtttgaaattggccatggtgggaatatttacacttcggaagttgacaaatggtaaaatcaaagcattttttttttttagttccccagagagccagttgtcagacattcctcagcacagcattgtccaaaaggcatcctgagagtgaaattcaggctctcaataccagaaggaacctagagataggtcatccgatcgggcctgcacatctgacagatggggagactgaggcccagaggaggacagtggcttgtcttaggtcatgcagtgagtcaatggcagaaccggtatttccactttaccacggtccttcaagtagaccatcctttcaagcaggaagctatggagtgacacagaggcttagcaaagcttcctcctcctgaagagggattagaaattcatgacgtgggccaggcgtggtggctcacacctgtaatcccagcactttgggaggccaaggtgggcagatcatctgaggtcaggagttcgagaccagcctggccaacatggcgaaaccctgtctctactaaaaatataaaaaattagccaggcgtggtggagggcacctgtagtcccagctacttgggaggctgaggcacgagaaacacttgaacagaggaggtggaggttgcagtgagctgagatcacagcactgcactccggcctgggtgacagagcaagactctgtccaaaaaaaaaaaaaaagaaggaagaaaaagaaaagaaattcatggaaggggaaatgggttttagagaagactgcttcaagattttcttcaggctgaagctgggctaggcatctaccagcctccctcttcccctgccctagtctcctggaccagccttccttctgtcctacgaggccacctccttcagcccaaggattaggaagttgcacttcagcatctaaaaatcttcccatggtccaagataccttcacagtagcttctatcttcaccagagaagcctccaagaaggtggtgaccttttgggattgtcctggacttacccttccctcttcttctttgaggctagttgatggctgtgggtgggatgccagccatccacccaggttatcggggccctgctgtctttggctttaattctccccagaacctcagggggcccgagacagggattcttgtgtgggtgatttattgagggggtgctttcaggagaaaccagtaagggcatgagggaagcacgagagtgcaggggaagaaactgggaaaacacaaggctgcagtggaagtctagcctcagcctgatcacgcgggagcttgggaatcatatccaagaagttgtcatatttacaggcaaaagggctgggcagtgatacctgcccaagtcagtcagccattggctatgttacatgggcaagggcacctataacctcccggatatctccagggaaagcagtgtccatccgtcaagggcaaacattcagagaagggtgcaagtgtgagctgcgtgcagctgggtgcacaggtccagtcaaggggctctgggcggggctccagccacctctgctatacttggtaggtgatttggtgggaagggaagttttactggaatctggggaccatctgtgggtttctgttttgtccactctccaagagccctacactgtagaaaaacctggtggttattctctgaggtcccatgtcctccctcctgtgtccagctggtctcagtaatgacagtcttactgatatctctcacatctcttctctagaagaccagagaccaaggggaactggagcgagagaatcacagcccaggagttcaggctcagctgtggatcctacagatccctaagtactgtatctgaccttttgctgggaagatcacatgtagacctcccagagagacttccaaaacagctctgacagacaaaggactaaccgctttcacctacgagggaggccatatgtgtgggaggcaccattgagctccattcctggtacccactaccagctcctgttagaagctggggaacagtgacttgggccccttgggacaagataacaggcataccaccacggctgcacccactattgtcctaattcaaactctttctctacttctcacaaccctgtattggtcagggaagattatgtgctgtaacaaacagctcagatagtatagtccagctatttctttttctttctttctttttgtttgtttgtttgagacagtgtttcgctcttgttgcccaggctggagtgcagtggcacaatctcggctcattgcaacctccgcttcctgggttcaagcaattctcctgcctcagcctcccaagtagctgggattacaggcacccaccaccacgcccagctaattttgtatttttagtagagatggagtttcaacatgttggccaggctggtcttgaagtcctgacctcaaatgatccacccacctcagcctcccaaagtgctgggattacaggcatgagccattgcacccggccctgctatttcttactttataccacagtccatcacagccctggatgggtggctcccttccaagcagtgagtcaggggcccaggcccctttcatcacatggctctgccatcttctagggcctgtcattgtgggtttctctgcatccagccacagtcagggaaagagaacattgggagctcttgggaaacctatggactgggcctgaaagtgttgaggatcacttgtacatgtgtcccattggccaagactcagtcacatgaccaccccaactacaagggggtcgctgggtaatgtagtctatctgcctggttgggcggggaatggagtagtgtttggtaacaacatatagtcttcactgtagatcttctttgatcactctgctgacttcagggacatctgcggccacctgtcatcatgatgttgccattttggcatcaggaagtggtggtgagctttgaggagctttgtgtgtgtttgtaggaagtagtttagcccagtcttagccccagggtgtgcattctgcccaacagctgcctagatttgggttgtaggcaagctaagcaaaggcaacattgggttccaaggcatgacctcattggcattggcttaaccagccaagctaaccggctagccaaccagccgggtggacgttacaggactacaagcatccttctttcatgaccttcccagggagccctgctcagctcagctgaatcacccttcagtgctgacagcagttctagtctgtgtccactgttggctctcgctggagaagcctatagagagccaactggttccctattgggacagctttgttttccctgctgaacacaaaatcccctgttcactgggagagctgacaaggagaccccatggggctggcccggtgggagcagataccaatgaatgcagcgcccgaatggcttcagcttattaaaggcgaatacacaggataactctgcccgccgagtgggagatagaatggagggcacagagctgttacagcggattagcagccgcagacggatggaggcaggtgcagccttttctgcaatttggaagggtttatgaaatactgatcctgtgctctataaatccttcccttgacctcatctgggctacaggctgaaagtgggggatttcttgttcagccaggcttgatagtagcttttagtattttccctgctccctgccaactcctagaattccctgggaattttgataagaggatttatgcatgtgtccatttattcattttctcttcattcattcatcactgacacatttaccaagagcctgggctaggtgctggggttacagagctgagtagaacatggagttttatcctcaagggactggtgtactgtgtgagaaagacacagaaatagaatattctaattcagattgttaattgttaactaaatccacacgtcagcagataccaacataacctttggtgggcctgagccagtggcaggcgtcactaagagactgctaagtcttctgcagcccaagtgaatgaagcctcaagtccaacaaggtgtcttgttgcctctctggatgggctgctgttttttttaatggcacagatggcagataatagaggacgatacttagaactagtggcatagctggaaacttgagttcctctagcaaaaactctagaaagttcatcttatgaggcagaatttgcatcttgaagaaggcgtaggaggctgctggcaggtgtttctctggctcgaatgcagatttggtctctatgtcttttcctcctagagatgggaactccctgggtcagacacccctcatccagggaggtagctcattttagcaggcagaaatctctgtgctctcctcctgggcttacagagctcatctctgctgtaagagttctgaacttactgtgtggctcaaggttttggtgagcatattaccatgaggaagagcatggagtgggtgatttggacctcagggctaccataaggcctgatttccaagggaagaggaacatgagaccagagggctctgaattaaccctgttaacttgtcccaaggggactcaggcgactgttccccagctctagcaggagctggtgcatgttggcttccaggaatagagctcaatggtgcctctcacacatatggcctcccttgtaggagaaagctggttagtcctttgtccaccagaattgttttggaagtctcttgggaggcctataggtaaacttcctagcaacggatcagatgcactacttggggatctgtgggatccacagccatgcctgagctcctgggctgtgattctctcacgccagttcccattggtctgtggatgacagggagtcagggaaacagactcagaggatgccctctaaaactgggaagcaaatatggagcagcagttagaaatcccgtgtctggggagttcttggagggagaagagatggttaagaaataaaagaccgggccgggcgtggtggctcacgcttgtaatcctagcactttgggaggccaaggcgggcgaatcacaaggccagaagttcaagagcagcctggtcaatatggtgaaaccccgtctctactaaaaatacacacacacacacacacacacacacaaaaaaaaaaaaaaaaaaaaaaaaaaaaaaaaaaacttagccaggtatggtggtacgcacctgtagtcccagctactcaggaggctgaggcgggagaatcgcttgaacccgggaagcagaggttgcagtgatctgagatcgcaccattgaactccagcctggatgacagagtgagactccatctcaaaaaaaaagatataaaagatgaacttggcaacttgttgaagcctgagacatgtcctgctgagatgggcagagcagggatgaagtccaggctatccactggcctcttgatgcccttcagcctctaggttccacaccctacagtgggctctttgtgagggcagctgcgtctctggctgtgtttctgctagcaccttccacacagggtcatttgagtctgtgggtacctggagtgtattgagaattcattactttcctaaagcaaacccgatacctttattctccatgtgagaaggtagcagaatttggtcttgccggtggggggacttcagtatctaccatggtgtgacattgttgtgggttgagtggttccccataaatagggttcccagaaacctgagacacattattcattgaaatgccacaaaactgtaaaaaaaaatttggagtggaaatctcttccaaatgtatcaccaacttttttgccttattaagcaatgcacaacaaacataattttacttttcaggatgattcagccacggcacaaggaatcgtgctgtctgaacagtcatagttacaaatcttattcaactgttgggactgtttgcctctgttcaaaatgatattgcgatattctgcgtctgtgtttcatggtttcataattttctttttttcttatttttttattttttatttttttgagatggagtctctctctgtcggccaggctagagtgcagtggcgcgatctccgctcactgcaagctccgccttccgggttcacaccattctcctgcctcagcctcccgagtagctgggactacaggcgctggccaccaagcctggctaattttttttatttttactagagatggggtttcaccatgttagccaggatgatctcgatctcctgacctcgtgatccgcctgccttggcctcccaaagtgctgggattacaggtgtgagccaccatgcccggctggtttcataattttctgcctcttctttgccctctgtttgccagctgttccctcctcctgccaatgtgttgattcctttgtgatagtagtttgactgtttgaacctcttactgcctagttctcacctgtattccagagaatgaagataaacagataagtggctccagtttacaacacttggaggtttctatcataccttccaaagaatctgaagcactttcaggctcaacatagatgtctgtaaagtagggaggaaatggctggtctcttcaattctcatatcaagaactgaggactggttgggcgcggtggctaacccctgtaatcccagcactttgggaggctggggcgggcagatcacttgaggtcaggagcttgagagcagcctggccaacatggtgaaaccctgtttctactaaaaaatacaaaaaaaattagccaggcgtggtggtgggcgcctgtaatcccagctacttgggaggatgaggcaggagaatcacttgaacccgggaggtggaggttgcagtgagctgagatcatgccaccgcactccagcctgggcatcagagtgagactctgtctcataaaaaaaggaaaagaaaaaaggaagaaaagaaaaagaactgaggaccagagagtctaggaagaggaagcagcataatggggtttctaaaaaccatgccctctaagtttgaaggaaccaggaagccttggaaggggaggggctccttcttcaaaagttttgaaggctgttctgagggtgaaacagatggaaggcttgtgctgggctgtgccagaaagtggagataaggccatctgtggggtgacagaagtcaggtgaggctcagctgatggcagtcctgtccagtcctaggatcggtgatgagggagattcagggagattaagagaatgggaatggcaacaggagtgcaaggatagaccacccttagtaaccgttccttccttccttccctccttccttccttccttccttccttccttttctttctcttctcttcctctgtttctctctctctctctctccttctctctctctttctctatctctttctctctctctctctctctttctttctgacagagtctctgttgcccaggctggagtgcagtggcgccatgtcagctcactgcagcctccacctcctgggttcaagtgattcttctgcctcagccttctgagtagctgggactacaggcgcccaccaccacaccctgctaagttttgtattttttagtagagacagggtttcgccacactggccaggctggtctcgaactcctggcctcatgtgatctgcctgcctcggcctcccaaagtgtcgggattacaggcgtgagccaagcaaccctttcagttccaagggggtggattctgtggcctgcgtccagtctatcagtcggtggcaaatggcagtgaatcggggatagcaaggatgcatcagcttccccactaagcaactccctacccttcacataccaggcagagacacagctaccctcccaaatagccactgtaggatgcagagcttggaagttgaaggacgtcaatgaggaataccttactgagttctgggccccattagggtgctgtggttgattagtgatgcctgccatgaggttgggtagagtaaccggtggtctgtgtgctgcctgttcacttgctttccatcagtgctgtcaaccctcatttttttttttttctgaagatatgttgctcattatcaggcctttcaaaataggaactccaggtttcacactttcttcttttctttctcttcttccctgcctgggctttcattaccattaagagccagaacttatctgccatttggatgaggaacttcagaaacaggtgcaggaagagaaacttgctctctcaagtgcagcaacttcttgaatgtggcccacttcccctggaaggctgtgaacaccactttatctcctaaaggcttggctggtgggaggaggggcaggaagcctcatggacatgagggcactatttggggaagggtatggtggcaagaatagatgggggtagaggaagctacacggaggttctgcctgagggctgggaagccaaaaggatggtcccttgaaaaggggcagccaggtgcagtggctcatgcctgtaatcctaacactttgggaggccagagcaggaggatcacttgagcctgagacttcgagaccagcctgggcaacatagtgagacctcatctctacaaaaaataataaattagctatgtttggttgtgtgcacctgtagtcctagctacgtgggaggctaagtaggatcattggagcccacgggttcgaggctgcagtgagctgtgattgcgcctctgcgctccagctggggtgacaaagggagaccctgtctcagagagagagagagaaggggcagctcctgcattgcgatggggggaggttaagggtcagtactcactagtcaacaggttgccatggctctgtgtatggaaagagacccctctgtcctgtgctggagtggaaggcagctgtgttagggaatgggcccccaccggccagtgactttggatgctgaacacttgtacctctgttttctcctgtgtgtaatggccatggccgtcctaataccacccgaactgcctcttcctatgtggctgtgcagcttactcgggacattgggtggaaagcactttggtgagagcttggcaggtgtagactcatcaccattccggttgctcctgccgcagacgggctgagctccaactggggcatgcctctgaggctgaggcagcatctgtaggctgggaacagggtgacccctaggtctgggactggtggcagagcagggtctggggtgacttcgcggtagaagcaatttcctcagcagagttgacactggctggggaggactgggactgagcagctgagggtcaagagaaaattctggatgtccaggagctggttcagccagctgaggtctcctgcctccagtcaggagggctttttgcagtcccaaatgctctgggcaagaggctttaatctaattacatgctttatttgagccaatttgttttccaatccatcttgttcagcaaaaagaaagagcctgctggggactcatttgcaccctcttgttccaagtggagaagaggggttgagctcccatctcacatggtcagtgcagcccccaacctctcccagcccggccaccccacccctgagccaggctgcagactgccctgccctcggggggagggggctggggcggctcaggtagaaaaagcctggcaggcttgccccctcccagaagtccaccccagcgtgcctctccgtgccttccctttgggggtcccggtgcactaggcaggaatgacacgggatgggcttccaggccaggcagcctgggaggggatttcatcctcaggaggtcacccagcctcggaaccttcctggctcctcctgtgagagctgccctcagaatccaatgccccatatttttaaatctgcaaatatattttcatcataaggcagtggatttaggatctgtgttattaaagtccaaacaaaacaccaaagcccttcaaacctccctggagagggaagatttatcggctcctgctctcctccccaggcacggagccacactctccaagcttcgctttttaagttttgcagcattttccaaaattgcctttttctgcccttccgattcctgcttggagcctttacttttcggctgtttacagagactcgagcctggtgacttccacctttggagtatgggagtgccggaattgctcggctgagggtcactttgtctgccgcacagtggtggcagctgcgcccgtttttattgaacttgctcaacaaatatttattgagggcttgttatgtgtcccgggccctggggatacagcagtgaagacttcactttggggaggaagagatacaataaacaaaccaaactgaaaaatgtatcactgcacagggtgacaagtgccgtgaaggaaccacatccgctacagatggagttgcttttcagaacagccagaggtcagccattattcagtgaatcaaggacatacttgagtgagaaatatctttgggtttaaaataattggatgtgccagtaatacaataaaattgcttttctgccatggctcctaaactagagtaaagataatgagagccaacattttttagtgcctgtcatgtcgggcttcatctcgctggaactttaaaagattgttacaaacgctcacccccgcttaataaatgaggaatcggaggttcagagaagtgcagcaatgtgtccaaggacacacagctttgtaagtcacagagccagcattttgagttccttggtcgcctgtctgccaccccctctgtcctgctagatcctttccacttcccagcatcctgcagccctgaagctcatcagtagtctgagaccattgccactggagccgcggattgtatcctggggtccaggaagagatgttcttgtccaactaacaccccacaccccatagacagcaggctgaggcctgcagaaaagccttctgattcagagctcaagggtcccatttttcagatattagctgtacatctgttaaaggtggcatggccttctgatttctggtgccactcaaaccctctccagcccaactcgtgccctctttgttgtcaaagagtttggcaggtttaaaagatgcctaaaccagctgggtgcagtggctcacgcctgtaatcccggcactttgggaggctgaggcaggtggatcatgaggtcaggagttcgagaccagcctggccaatatggtgaaaccccatctctaccaaaaatacaaaaattagccaggcgtagtggtgtgtgcctgtaatcccagctactcgggaggctgaggcagaagaatcgcttgaacctggaaggcggaggttgcagtgagctgagatcatgccattgcactccagcctaggccacagatcgacactccatctctaaataaataaataaataaagcctaagccctttacccaggctgtctcaggggtatcatcagaataattgcaaagggtgctggctgacgtcttttgtttggggagcctgtgtttgtgggttcgttggtccaggcagctttggtgtctcacagagacagccgcagtcagcttattgtccagagtgtatgtgccagtgggttcgctgagcagtcagcggtgacctgcactgtgctaggtgctgggacaccaaggtccgatttgccaggggaggaggcagacagaaaatcccagaccaggaaatgggcgctaagaacctggaggttttcttgtgcctggggctgagaggaaggctacacagggaagtggcacaggaacagattccaagcacaagtgccaaggggaaaggcattcatggcctccggcttctcctaatacccaagagcttaggtcctgttttttccagatattattttgcaaataataggattctaccaccgtgcactccaggggaggagtagacgcccccttgggcctgatgtactcttcatccccagccctgcctggctctaggcctgtggcacagccaagaaagggaccttgctcctgtccggagacagggctgcatcagccagatcccaccacaccaacccattttcctgtatctgctaaggactggacccaggacactgcatctcagatctcagctctcctcctggcctcaagaggccccaggatctggccctgcctttcccactggcctgccatcattcaccctccactctcagctgcagagtcggaggccacctggagcccatcacatgcagttggcagcaccttctcatccttcaggacacagctgagaccatctctgacctccccttacccatctcacggcaccatagtcatttcctcctaaatcctgtgaatgggtagcagttatgaccatcatcactaccacattttactgatgaagaacttggaatggtgaatgaccccagatcataggttggatgtgaaccctttccctgcagccctgctcagtagatttccacttacgtcctggggccagaagtagattcatggccacggtgagctgcaagggaatctttgaagaagagtattctagattggagacattagggtttgctcttgaggaagaaaggaaaatcgatattgcagggggccagagcggacctgtcagactcaggcctggtgtttgaggctgtcccagtgggtggctctctaggagacagtatacaggaaggcaggccttggccctgggtgtgcattgcacagctgtgtgcacctccaggagcctgcctctgcccctgttggtgcaccaaagggaaccatcagagaaggtggccacaactagggaggcagcagaaagaaagggcagggcttccctgggcagcacttggtgggggccagggcaccagggccccctctgaccagcgaagccccgaggaccccagcttggtgcaggaagaggacccagtgcttcagtttgccggtataaaaaactcacacccatgcttcctcacctgaatacatagttgcagtccctgagacagaatgtagctcaggcagcagaatgacagtctaggctcctgagagccagaccctggctctttgtaaccatggtacggagtggagagcacgttctggtaaccttgggcatgaggtggggcctgggcagtcagggcaccgtccctgagagggtgagagcaaaagccagcctctgccctatgtgatgaaacccagcagccctaggtgacctgggccaggccaggcccctggggtggctttgcatgacatttaaaaaagaagtcaaaccctatccagctcccatggcccctcaagctctgggactcatctctcagctgctgcccctgtccttccgtccgtgcaaggaactccaactttcatccagtccctgaaccatgccgagctgggtcctgcctcagggcctttgcacaggctgctcctcctgcttggaaccctcttccctcagaccttcctgccctgcctcctttgcaccgtttaggtcttgttcatgggctacccctcagggagctgtctacagccaccctggctatggcactgtcctcactcccagccaccttaccatgcacacagttggcattcagggagaggatgaaacctcacacacacaggcacatgtgcgtgcacacacacacacacccccacacccacacacacacacacacacacactcttctgctgtctcctggggagggggtagcacttctccacagcagaagctctatagattggaaatagaaatgtcactttgttgaatacagatgtcatttactataggattcccaccccttgtaagtaaatggtcctcatcctcgctaagaagagcctcacctcggccggtcgctcacatctgtaatcccaacactttgggaggccgaggcaagcggatcacctgagctcaggagttcaagaccaacttggccaacatggtgaaagcccatctctacaaaaatacaaaaattagctgtgcatgatggcaggtgcctgtaatcccagctacttgggaggttgaggcgggagaatcgcttgaacctgggaggtggaggttgcagtgagccaagatcacaccactgcactccagcttgggctacagagtgagactccatctgaaaaaaaaaaaaaaaaaaaaaaaaaaaaaaaagcctcaccttagactatttttagtgtttctttctttctaacacaagaattgtatcctcattgcagtaaattttaaaatatacctaagacaataaagcaagagtataaaaaccagccacaggcccaccacccaacatttctggcacatgctattcttctagaataaaatccaaacccctgccattgttgaaaaggccctagggactccctgcaaactgtaagcctcatctctggctgtgcaaaccccagcttttgccagctccagtctcccttccttttggtttctcacactttcctgccctggggcctttgcaactgccgagtgctgggatgctcctccctgcacttcctggggctgatcccttgtcatctgagtgtcacctcctgggatgggtctaagtaggtctccacctgtgccccctgcccccacgcattccctcccagtgtgctcggctcactgtcatcatttcctgagtgtcaccgtcaggaatgggagtgatgacactcgtgctgttggcctctcccctcctgctgtgatgccacccactgctccattagccttggggatcacccagtgcctcccagagctgttcatgtgggaagtgcttcatcaaacgttcgaatgaatggatgataaattcctagaagtgcggttgctgcgttggagtatgcatgtgtatgttctcagggttttgacactcaatgccagccacgctcgggaaagttcatattttaatctgtgccccagccatatcgtgtgagtgtgtgtatgcttgccttcaccagtttgctaggcagaagcgctatattcttgttggtttatgttttgtttctttgataatttgagattgaacatgggtgcatctctttgttccctttttatttcctcttttgtgaatggcctgttccttccctttgaatttttggttgctgtctttttcttagtgattcagaagagttctttatatgtgaaagacaccagtccttggcttcctgtgttacaaacattttgggcttgcttctagacccttacttccataggttgctaagctccttggccagtccattgctagaagatgcttcatttggggcatcgttagcctttctgcccccaaggcccaaagtcaaatgagcattttgcttttgaggcaggtagggcttgagggtgatggattgggtcagcgagactagtacaggcttagagagatgggtgggggctagagatctgcctgtgggccccagctctccctgacaggtggctctacccctggatgaggtgctgttggtgagggtggtaagaaggtggtcttacctggggcagggtggggcaagtcacgaagtcacctgcagcctaggaccaagaggtgagagccagcttcctggggagtgtgtcctccattctcatcatgcctcgcgcatgatggcccttatgaaacccacggatgcctgcggcaccttgaaaaccgaacacatggaaatctggactctctggccgcggagattccatgcagctttctggttctagatcaggcagcaccaaacatactttctgggcagactggcctcatttgccttttgtcacctgctggtgggcagaatggcccagccgaaatggacagagctggctgggtgcccctgttagccccagcctttctccccttaaactctttcaccctgggccagggagaaccaggggctcctcccctacgcccagcccttggcgtctgcaacttacccaacccttccaggtttctctgcccggggaggacagaccatgttggctgggtgtccctcactcattacaccccctgccccaccttcccaagcccgacagcccagaagcagagcggcagaggtgttgcgagcgagtgggccagggctgctgagagcgagacctttgccagctccccgccctgctccaaggggaggtgccagatgcggtgcccctggcttcaaccgtggccgccgggctctgcctgccatatgctcagagatgagcctcgatccggcgagcaggccggctcagcaggattttggcacctggggcacaggaggcagaccagaggggccagctacccaaggtggaggaagaggcaggacggtctcggccgctgggattgggcctgcaggccacctcttggctcttggctgtgggtcggtcaggggagcaggtgggaggaataaaagggagggtaggctgctcccaggaggagccaggatgccagccagccaggatgggcctgctgcgagccaggcagatggtggcctccaggtctcagtggctctccctgggacagagcacgtccgagtagggggccaggcagtgcctgtgtccagccctggcagcttctgtctctttttgggcagtagagtgagatagaagggcagccctggtgcaggacctcctgcagagctgccagtatttacctgtgccctcaatcctagctccagaggctcccctgagagagcagggcagcagggcgttctgcctactctttacttgttactcctgcatggagcaagtatgtcctggcagggtggatggggtcccagcggctgggtggtggtaggatgggaaactgtggggcataaaacgttgggtctcctggtaaatgaggctgatcaattggcccatatagtctgtgtgtatatatggttatgccagcttttatattaaggctgaatcatataaaactgcttttttaaagttgcaaaatggtccatttttagcactgtcatctgtttcatcttaatagctttccatctttttctgtgtttctgaacagatcaaatagcgtgaaatcgatttgtcctttaaatgtttacatggacctacctctgaaaccatctctatccagacatctctcatgactatttttctgttcagattccatgtctcttactcagtttaatttgctcctttatgttttcctaacattttgcatttcattcagatttccaagatttttaggctaaagttgtatatactagccttgtaatttatttcttgttacttcttaaagttccgttttctttcttttatttgtagttaaacatgacagtgttttgtcttttttttttcttttagtttgtatttgggcttttcaaagaatcagttcttggatgtatttatgtattttttctgtattctactatatttctacttctgttgttattaattcattccttttgctttctttgggttttgttttgctcattttctagcttctagaattgaatgcatttcatttattttcattatttcttctttaataacaaataatatcattgtggtcaggaaatgtggcttgtatagtttgcgcttcttgggattaatttagcattctttcactaaggatttctgtctgtttcatttttgtattactattgatttttgcttaatatatttcaatgagatgttattctacgtcaaaaaatccttgtttaattactaggtgatgttctttttccactataaacatgcttgccttgaattctactttgctgatactaacatttccactcttggttcgtttcttgttttcatttgctgatacatctttgc[221 bp omitted]gaggcaggagaatcgcttgaacccaggaggtggaggctgcagtgagctgagatcacgccactgcactccagcctgggcaacacagtgagactccatctcaaaaagaaaatcattttatttggttatattccccttaaacagtactctgttttaaattcagtttttcagtagagcagttggatccatttaccttcattgttttgtctttagtggttgctcttctgtgatcttaatttatcataattgctttttatatttttcattttttctgttttatcttttggcatattacctataatttatatcgtttttctccagagttctgtgattatctttgggtttttcagaagcattagttgatctaatagctcttacttgtcagaatcgagcatgaaatagcattttttacattctctatacttaagacaaagggttttattccccacctcattctacttcatagtttttaatatgatctgaagtttcaaactaaatttaaatattttatatatacatagctagatagatacacacacacacacacacacacacacacacacacacacatacacacatggggacagagaaggagacagagccactgatgttccctttcaaacagttaaaaataattttgatatttgcattatgtttaagaaccaaatttggcatctctatgtttactggtttcagttttcatcaccagtaagcacagagatatcaatcacatcaccttgtgtttatgccatcactttcccctgtaaactcttacttttgactcatttcatagttggttggaaaacattctcaagtatttatttcaaaaaggatacataattggaacattttgtgagcccttgcacatttgagaatgttttttctttattgtggcctatatagtataagacagtctagctaggtataaaaatcttaggtcacaaatttttccctttaagaccttatagacattgctccatgatcatctcactggcttgttgttgttgttgtttaatctgtatatattcttttcttgtcctggtatttcatatgttttgcaaagatgtgtctggatgttggtccccttttgttgatttttggaaaacttcagtgagctctttccttctaaatatgtaggttgtctttttcctctaaattttgtaagagtttctccaatttattctccatgtttctggatcagttttctacagtatcatgaatctttgctgctttcaaagtggattacttatttatttttagagacagggttttactctgtcactcaggctaaagtgcagtggcgcagtcacagctcactacaatctcaaactcctgggctcaagcaatactcccacctcatcctcccaagtaaccatcacgcccggctatggtctttttgtttgttttatttcattcttttaagggacggaattttgcagcattgcccaggctggtcttgaactcctagcctcaagcgatcttcctgccttggcctcccaagtgctgggattacaggtgtgagagcacacccagcccttctgaaggggattttaattgtgctacaggggtttcatctttttccaactctttcttttatgcatcaccctttttgtttcagctcagtttaatctcccttactgcctttcttctcctagttcatagaggctttgtcattttagtctttttagtctgccatgcccatttggcatgtacacctattgtgtatggctgtttttaagctacagtgacaaagatgaatagttgtgacagcaactttatggtcccctatgcctaaagtattcaccgtttggtcctttgaagaagaaaaaaattgcagatccatgtactggtgcaatggctggattcccatctcagatttaaggaggatggccaggaaggcgcacagctctgtcttcagctcctggttcctaccagcctttccctggatttccttctgctctgtggaggtagtgctcttcctttctctgcattgcct[143 bp omitted]ggtgaaaccctgtctccactaaagatacaaaaaattaggtggacgagctggtgtgtgcctatagtcctagctactcgggaggctggggcaggagaatcgcttgaacccaggaagcgaaggttgcagtgagccgagatcatgccattgcactccagtctggatgacagacagggcatgactccgtctcaaaaaaaaaaaaaagaaatataaggtgacatctttgctgtactgctgtccttctggtccctagtggtcctgaaacttcccctccctggaggagggatcgtccccactgcccccactcacttcctgcttatttgttctctggtctttgtcactgtgtcctcctcccttttttcaggacttttctgctcatcagacaaagagctgtgtcctgaggtaaaacctgaacaggttttgcttagtccaccaccatctgcctttaattactagagattgctcccagatcccagcgttgggtcatcatcagtttcgtttttggcactagtgtgaatgttcaggtttcctcattgtctttatggctgttttggaacaaaacaaggaggagctacatgagaggctgccaaatagatgccagtttgaagaaggagtcaaagctgcattttaaaggtgtggtttgtccatcttgaagcactctctgtagctttgtgtgtaccatagagagagaacatacggtaacattttccttattcgggggccattgtccagtgacctcagctatctggaatacaacctaaacaaagagtccacaagcagccaaatagctgtcacagtgtccatgttctgaaggttattcactttacctaagggagaacatttcagcctctccttccaagcctagttacctgtattttacatacaattctagcaagcttggtctttgttttcctagcaaatctgaagggcataggggacattttgcaacaagcacactgatctgacaagaatttccagctgacagaaaggaaagacaccaaaaaaaaaaaaaaaaaaaaaagcaaacgcaactccaaatgctcagagggtgatgtcattttctgtaagggcaagcagcctgaggttctccctgtgagcactctccagtttgactcagcagccaccttctctggatctttcctctgccacactgggtgctctgtgcaaatcatgggtgtggagactgtccccatctctcacagttggttcagactgtggttctaaccctggctgtgctttagaaccatctggggaacattaaaacttcagacactccggccattccctaagacaaagaaatcagaaagtcctgggagtgggacccaggcatcgtgatgccactgcatagccaggactgggagcaggaggttaagagcagggactgggctgccagactgcctcattgggcacacgaccttgagctggtgagtcaccaatgtctctgtgccttagattctcatctgtaaaatggggcctgattgaagggccaagacgagttcatcaaccgtgagaacagtgcccagcgcctcattagtttcgtgagagtagctgccattagtgaggtacagactggatattcatggtgatgactgtgatttgtcaagcagggcctgtgagtgcaatgtaattaggcagtgatggatgccacacattctagggcagtctctgtcccaggtagacacttggctctggagagaagagctgtagaggtttctaggctgggacagtgacgctgaagggacaggggcaggctgtcccaggactcatctgccttcctcctgccccgccccccacccccggggtggggcttaccttgggcgggctgctctggaacctttctgagctctcagttctaagctaggcaccgcagtccctccctcaaagcatcagatgaggctcggaagagctgacatgctcaaaggcaccccctctgccacagcctatgctatctacaaggctgagatggagaggtgcgccttggcccatggtgaggaggccggtgaaagggatttcctcctgattggaaatgaaagtgctggtgtgggatgatggcttttgtgaaaaaaaaaaaaaaaattgcgaggagagtggattgaaggccacccctgcaagaacgtcactcggcacaacttgcattccaattcgcttccctaagtggagaaagcaggaagggatttcagccagctcacgcagaatcgccaggacttacgcacaacctgggttcagccccagcagtggctttattgtgagcgtcatctatccctgagctggcaaagatgtggcccagagcggctgttcctcacagggaagtgcggccgcggtgctgatggtgctgatggcgccgttgacttgagtgtttgggctgccgtcactttcatcccaacctctcaggcttggccacagtagagtgagggccactctctctggacagcccagtccctgcaccccaagaaatccctactctagtaaccaagctgctatccagatggcaggagggatggggactgtggccaccagtgccatggagcaggggtgtcatgaaggggctccgagggctcagatcatagggagcaggaagcagggctgtttttctcccatttcctgagactggttcctaactgggggccccaagagtctggcacaggaagcggtgggaggctaccacacccatggcccccaaggtagtgggatagagctgcattgatcttcattgaggcaccagtcaatgtatctcaggacctcgatggaggcagtggccttcacaggccagaggccagccctggagaggtctccctgaacactccctgcagatctaagtcctgggttggggtgcaggtggcactgggaggcctctgctttcctgcttcggcttccccttgtgctcccacacaaatcactcctcccctaccttgacctttgttttcccctctgcgggataggacgctgccacctgcccctggagcagccgcccgtgtgtgtgcacgtgtgtgtgcacgtgtgtgttgaatctttcccctcctggtcctcttttcctaatccctcaccaggacacacacccagccaacttccatcaacccatgccaccactgcttctagaacaggctgggccccctgcagctccctgcagctccccgctcctccccgctggccagcctggctggtcttcccccaggcagtctgggaattgctaaaatacagggcattcctcatccctggctctgagctcacctctgctcacactgagggggaatctgtcagagtatcgcctaaccaagagtgcagggatcttggcatctcaggccagccttggcagtagctacccagagtgcactgggcaggtggcttaccctctttgagcctcagtcttcttgtctgtggaatgggaatgatacctacccatcaaagaagggttgggagaattgaatgagatcctgcctgctgagtgctgggggcagggcagactgggggagatttgctgaggctctggtgggctgtgccgtcacgtgaagctgtcacacacagacttggcgaaggaattgtgtctccttgttcaaagaacagcgatggctggcagggaaaagccatggttgggctgaagtgggaagctgcatttgggggttgacacaggcccaagggctggcaggccctggtgccctccacatcctgcttggctctcggttgggccctggaatcccccagtgatacccagtggacgcaggcctagcagccctgcctctcaccagtagggcccattagaactgaactcgtcttcgtggggcattttatttgcacactgcagtagagtgaacaccaaaggggttttttaatgcttcatgggctgctaatttcccctgtgacctcttttgttgaggcctgaccccagccagaggctccgcaccatgaaagccagcgcctgacacagacccagggcgcggggtgacaatgaggcctctatcggctttaatcaggctccagttgagtcttaagaatagggagaatctgtgtggtgctcagaagccctgggtggcaggagccccccgagactctcacggaggccagggtggttgcaggcggtggctgagggattcgtcaggccagggagggggtgggtgggtcggacgggggccctttgtccctcaggcctctttagaagcgcaggcctttcctgaatggccgcctgcccgcccggcctggcccatgggtatcacaggcctctggctatttagggaggcggcctcctactctgcccgccagcctattcatcgccagcctaattagtttttgtctgtgctccccccccacccccctgcagactgcgattcctactgcaaggcctccaaggggaagctgaagattaacatgaaaaagtactgcaagaaggactatggtgagtgagagtccccttgtctggggaggatgggagggggccacgtgaccagcgaggtgctggggctggggtgcagctggcccccgatgggtgttggtcgtgaagaccctgtgaccgatgggaactagccggacggatcccacgcctgggaatttctcatcttttcctccttggccctcagagacgggggcatgaggagcccagtggcctggtttctccccttcaccctcctgaggctgggacacccaggctggcctctggctttgactctgccgctgatgggctgtgtggccacagaccagtggctttacctctgtggtcttctgtgtctgcatcatactgcggggatttgacccgagtccacgtggctcaaagggaagctctctgggcatcagacaagggctgggagctccccggtgcatttccagtgttccgccaggctgtagcggggccgggagtctgcgctgtaaacggctcaccactcattcccatgcaccggaagttccgctgcccagacccatggagcagacagtcctgggggccacctgcagagattgcttgtcacctgtgacctcaggctcccttcccgggaagggtgtgtcctgtccccttgctctcatggtggtcgtggagagtggagatggtctgggagcctgcaggaggagggccccgcagtggccagcgggcaggtgtgtgtgaagagctggggctggtggcaggggctcttcagaatgggggacgcaaatagaaaccctgaaagcattgtccagctgaccactggcaaggcccccgcatacagccagggcatccatgtgggtggctgaggcccccaccataggccgggaaggagccccaggcccaggactcctgaatccaggcctggttctttctagcacggggcctctccttgacctggtgggccagggattgagcctggggctggccccccaattctgggcccacgaaagtccacatctgcccacctccctccgtcctcctcctcactccagctggacatagcccatctttcctgtcccatctttaactgaccccaggaggtgcagcccctatcccctcagtggccctgccagccccagcacctcctggccacctctgggaaggcagaacgacctctctgttctgctcagcttcccaaggctgtcctaatcatatgcttctcaggggatctgggatgagtcccattgcttacctgagcctcagtttccttatatgtaagatggagatgatgccacttgctgagtgtatacggggaggacagagcacgggtgcctaacaggctcccagcaaacagtgacctctgcgtccaaaggaagctggtgaggaaagaggaggagggaggaaacggcggtggaagaagaggggtgagaagcgaaggccacctgtggaggaggcctcactatccagaatctgagctccgtcccttccctgaccccgtgggggtccggcagccctaccctgggacccagacctcatggagatcctaactgggccagctgcttgaacaaggctttcttctttaataaggacagtggtcaggaccttttagcacagtgaaatgaatgacgaggcccaaaggtatctaaaggaatctggagaacttctaaaatgttctcgtttattgtgtgtgtgtgtgtatgtgagagagttcatacgcacactccctacgcacacactgaagccagggtaagaccccagtaattcagccccattccccacaggccttctggccttctacagggtgaagaagagcagctggcaggtattatgcatcaattcagaagctgccaggctatgggcatcaaagttcaaggcccttcaggggtctacagtcaattcctaaaagctgcgttaagctgtatacatcccagggcagtgcagaaacttccacctcccacgggaaaataaacctagatttagaaatgaaacttgcaattactttaagataaaggaagtgcgtctccaagcc[138 bp omitted]atgatgaaacctggtctctactaaaaatacaaaaattagctgggcgtcgtggcgcacacctgtaatctcagctactcgggaggctgaggcaggagaatcccttgaatctgggaagcagaggttgcagtgagctgagatcacatgactgcactccagactggcctgggcgacagagtgagactctgtctcaaaaaaaagaaagaaaggagctcatatggccccggagctgcagggactgcatcctcccagccctgggtcttcagtgtcccctggggactgttaggtgggccatggggcaggcctctctccactcccctaggcagccctcttgtgagatgacgacttgagcaggacgcccaaggctcttgtagctttcctaggctttggacctgggcaccgcagcactgtcctcctagcaaagcggtgggcccagaggagttaatgggtcgcagagggaaagccctgtgcttctcctctccccatccttccctgcacaaggcctaggggtaacctcggcaaggaggtaggaggggaagggagaggaataggtgggcttgcttggggaatggattgttttgatcgcctatttggtttggttttagtctcgaagaactctttaagcagctacactgtggagaggcagctgggagcaaggaggaaggcactgacccacagcctctgctctgttctttaatcatgaaatcatgaaaatggggcttgtaaaagggcccaaaactgatcctgtgttccactggattctatttgactcaacctggttttcttgtcctctgactttgttccttccagtgaattctgcctccccaacaatattccagggggcaccttggcccctcagagctctcctggcccctcacctcttctcttcaggcagcccctctctgtctgccgaacctgacaccctcctttcgtagactcgaaggagccccttaggccttccctgcgccctgccctgttgtggccgccctgggcaatggggggcatctctcttggggcggggaagggtggggcagagcctcagggtgccatcggaccctctgttccctgactcagccttccctttgcccgacacccgactccctcatgggttatcagcaaagcaggtagcagggacagcgggcttcaggttgcttgggtcataggcagtgacacgggcctggctgggtgagatgacttgcccagttacccagccagggagtggcccagcctcccgccccttccacagcagccttccttgagtttttccttcccatcacaattcctccagagagctgcgggccagccctgtgtgctcacctttctagacctaatggtggttacccggctcctgcccccacacccatggcccaggcgcgtcacccagctgtccacatttctgctgcaagacaaggctggaggaacagcaggtggggatggggtgggggggcacagtgggatcccccctgggagctgatgggggctggggctctggcaccactagctttcatgtcctcctcaccacactccaagcctgtgactccacagccaggactgacactctccctgtgattcctcagtcctgggggtggtgtggtgtttctggttccaggactgttcctgggactcttgtggtcacttaaaagttgggggcacttcgggaggcagaggtgggcggatcacgaggtcaggagtttgaaaccagtctggccaacatagtgaaaccccgtctctattaaaaatacaaaaaattagctgggtgtggtggtgtgcacctgtaatcccagggaggctgaggcaggagaattgtttgaacctggaaggtggaggttgcagtgagctgagatcgtgccgttgcactccagcctgagcaacagagtgagactctgtctcaaaaaaaaaaataaataaaaagttggggagtcctccccaccctcagctcagcctgtgtgttcaggcaggaggcaggccaagaacaatgtctggaaagggatttcacgggcctctgcggagggctcagaggagccctgcggggtggggtggcagggcctcggggagtgtgtttggtcatagaggagtgagtgcccccacaggggctggcggggggccctgaggacaatgccaggcccacgggtttctctgaggctgaggcaaggcctccagtgggctctgctggcgtctgtggagaatctcccatgtgtcctgtgttgggcccctggcccccctgagaaggtgtgtaagggggtgtccctcccacacagacttgggccagcccagggagaaggtgaccagtagggggagggcaggagggatctggcctggggatgagagagcaggggaggccgccaaaccgggcgggccagggcgggccgggcaggggctccctcggaggctgcataatccccgctctctgactgacacccggcagggggccaattaggaaacacatttccttcacccagggcacttggatgttccagaagccgctaatgagaacctggggtttgctgcccctgctgggtgaagagcaggcccggctgccagcagccccggacccccttcctcctccaggcctcgcagaccttgccctcgtgtggctgaagagcgcgggtctggggctccgcggacctgggcagcggccagagggtggaaggctggggcggtgggggcccatgagaaggggcctgtgggctcggggcgccggccctgtcccgtgttctctcgggcacacgcttacagagagccagagcccagctcccgtaggcttaagggcacgaagcaaggcaaagggatttggggtcgggggggggcctcagtgccaaggccctgccatgccactcatatcggagggaccccaggaccgaagggagcgctggagacgcaggttcctaatttgctgtgtgactgtggacagggagcttcgccgccggggcctcggtttcctcatctgtcacatggaggtgtagtggagggcacatgatatccttctaagtgagaccctggctgtgccccccgcccacagcaggcaccgtgtctaaggggtgggggccgtggggaggcggtctcgtggggaggcggtctcgtggggaggctgtctcgtggggaggctgtctcgtggggaggcggtctcgtggggaggtggtctcgtggggaggtggtctcgtggggaggcggtctcgtggggaggctgtctcaggtcacctggccgccctctcctggggcactcagtcctctgttaccctctaggggatccggctgttcttacaaatgcttggaggagagccgccagggaggctgagtgggtagcagttatttccagaagataggttttattattttcaagcatattcgcgattcctgccagcttctcaggaaagcccaaccttggagggacccttcctctgcgaggaggcggcgagtgagcgtgggtgtgtgtgcgtgctcaccacacagttggcatcctgtggggcagctcagatacaggcggagcaaggccctgctggaggcacctgccctgcggtcacacagcacacacctgaaaccacagccccggaaaccaccgccagggaactggagcatcccagccccgccccccgaggccccgcctcacaccccaccaagccaagaggcttccttggcggagcccctctgcctcctcctgttcccttcccgtctcccttccaacctcttcctcccatcccgtccccgtgctcctgggaagaagctccactgttccatcctcacctcctcctgtctgcgctgcctcccacgtctcacacaaccgctgtgctcacgtccacaccactcacaggcacacataccacacacgcatgcacacataccacatgcatgcacacaccatcacatcacatacaccatcacacacacacactttatcacacaggcacatataccacatgcacgcatacacacatacacaatcacaaacacaccacacacatcaaacacagatacacagactatcagtcacactcacatcatacacacaccatcacacaccacacactatcacacaggcacacacaccacatgcacacatacatacaccatcacaccacacatcagatacacagactgtcacacacagtcacacacatagcacacacacatgcacatacacaccatcacacacaccacacacatcaaacacagatacaccatcacacacaggcacacacactatcacacacacacatcacacacgcatgcatacacacaccatcacacatcagatacacagactatcacgcacacacatcaaacacaccatcacataccacacacatcagatatacacaccacacttatacagacacacgtatcacacgcacacacaccacacacatcagatacactatcacacacagactcacacatttatcatacaggcacacataccacacacatatcacacacattcacacactatcccacactattacacacataccacacgcattatcgcacacatgcacaccccatcacacaccccatcacacacacaccccaccactatacgcataccactacacacagcatcacacatgcacacaccattacacacacaccatcacagcactgcacatcccgagaagtcctggcccagcctcccctccacactcgttcattgagcacctgctgtgggccccatcctgccctgggtgctgagcttgcagatctgtgtgaggctcagtcctgaccctcagagagcttacagtctaggaggggagaccgacatacagacaagggccacagaaggagggggtgtggccgggttgcagcctgaggtgggcacacacacggtgtggcccattctttagagggggcaagggtgggaaggcttcctggaggagggagcctgagtagccagtgctcactgggcaaagcagggctcctcggtggagggaggaaggtctctaagcaagaagctaggcatagcacgaggaaacgggagaagagtaagagcgggggcgttcagtgcagtgtggggcccagggaggctggagagaggctggtgttggcctcatcagttgcatctgtgtgccgaagccactctgacccctccagctcacgtggacacgcgggggctcccatccacgccccgatcccctgcctcaggtggcctgggtgctgccgctggcttcttcctactccctgggactcagaaagagggggagacagagagctcacattctgaaaggtgagatcatctcacttctgccagttcttggaaaagttattcgttcccagaaatgtttattagtcacccttttgttgaaagacattttggcaccaccagatggaaaaatcaaaatgcttctcacaggacgatttgtctcaagtattccgcctgacatcccacaaggatgatttctgaggatacaactcaaggaggatgttctgttggcatctgtggggagaagccagatctgttcagctgtgtgtgtgtgtgtgtgtgtgtgtgtgtgtgactgtgtatgagagtgtgtctgtgtgtgactacgcatgtgtgattgtgttcgtgactgtgtgtgactgcgtgtgtgactgggtgtgtggctgtgtgactctgcgtgtgtgattgtgtttacgactgagactgtgtgtgactgattctgtgactgtaagtgtgactgtgtgagactgtgtgactgggtgtgtggctgtgtgactatgcgtgtgtgattgtgtttgtgactgtgtgtgtgactgagactgtgactgtgagtgtgtgactgtgttactgtgagtgtgtgactgtggctgtttgtgactgtgtgagactgtgtgtgtgtgactgtgctctcttgggggtccgtggaagcagtgggcctggggacctgagcagaattctgatttgcatcaccataccgtctgcgtgccccggtacctccagaaccagtggaaaccaagtagagggcttgcccagccaacaactattccctcccgctgctgggacccggactgggcacatcacagccttgatgctcatccttatttaatctccacacacaccttgtgagggagggattttcattcctgtcaataggacgctgagactcaacaagataaaatactctgcgcgggattaggtactccacggctgagaccttgcttctctcccacacccgggaggccaggctttggcagcaggagtaggcgcggcagtcctttagaacactcaagaactgggaccccatcggggccactgactctggatgagccttggaggagagaccacagagacatcttcatgggcaaacaggcgggagcgggcaccgtggtgctggggatgtccgagatgatggagcagaggcactgggcatagtggcagggatgttggtggtagcgggtggtggtccagaggtggattggtgatgggcatggctgtgtgttcgaggaagcttccaggaagacccctgatggtgaggggggagacctagttggcaatggaggcaggcatagagaagaggcagtggtgggaatgaccgtagctcactatggagctgatgtgggtcagtgtgtggtgggcggtggtggatggatcccggtcctggctcagcccttgtccagtcgctcaggctgggaatcagatgagccggggaggggagggtctcaccactcccgcctcttgtctccagctagcctcagggacacggggcctctcagcaaatgacggactcttccccctcagcagcaccctctctccttttcttgaccttggagtcaatggctattcctgatcgggctcaatcccttcaagtgtggaaagctggacaggttatcagcccctttgtagggatgaagttactatgtcttggatgtgggcagagatgttagaggagcaccctgggggctgtcccccaaggtcagggcccctgctgtgggcccagaggcagctgatgtgatggctgcgaaaggccacctctcccgagcttgcccccctgtccagggacaggacgcagaccagccagcagcacgtggcatggtgtttcggagacttgctgacccttccctggggtcaccggcccctggggaatcctctgatttcccccaccagatgtgaccccccccccgagtgccagccccatatggaggccagatgtggagctgggcccgcgtgagtcagtctgaggtcgtggaatgcgggtgaccaccaggttggccagggaaggccagtcggtccccatgacagctcgacagaaaagccccagagcccacaggaagcttgctctggtgagagcccggtgggggcagggtgctgtgatgctggggtctccaggcccaggaggctctggggggatgcggcccttcccagcacagcgacttgccatcccgcagagcgggagccctgaggggagagatgggccccagaagggccctccctgggatctgggcagctttctggccctcatctgctccttccctggagcttcctcttgtctctcccgatgctgttttcctctcctctgagcatcctgtttttaggaaggaggggtggggagagagggctctaaggggccacagaggcatctgatgaacagtatctcctgcccttttacagatggggacaccaaagctcagagtaggggtggggtggggatctgtccaaggtgcccggagtgtggggctggggacaccaggcgggaaaggctagtcttctcctggctcagccgtgccctgtgtctccgtgaccacagagatcttctcccgacgcagagcgcgggtgggcatttcgtgaggtgtacccgctggctctcccctgggatgagtgcctttggcactgaggacctcagcacccccgccattgttcctgggtttccttcctgaggcctgtctcaaagtcttcacaaacctatcagctcagttctgcctgtgctgggctcaggcctctgagataccatggggtacccggggggggaccccagcctcccaagtagtctacaggagctttggggggcatctttgcaagccctgacccctgagtcagttcatccggcagcgctcagctctgcccccaccctgctgtggcccccaggtctcagctccttccttcaggtctcctcagggaagcagattttgaagatggcttgacttttaggagctgacgagttccgagccaagtcccgtgtgtagagagtgcatggatgctaaccccacacgggacagggctccacaccagggtgccctgggagcgccctggaaatgccagcccggcttgcggtgaggggatgctcttggctgtcaggcaaaggggctcgctggaggtggcaccttggtggagaaatgggcggtctttgagaggttctcagccgggccactcccgctctgtggagtggtattaatatacatctgcaggcctggtgggcctctggctgaaacaccttccacaccaagccttctgggagccccggagggagctgaaggtggactggattgagcccatgccaagggaggctggctttctcactttccctcctccagaggctgggcccccattgctgctgagggcgctggcctcggggcggttggggggacgctcactgctccaccctcctactgggtggttctcgatggcatgtcccgcgggcccagccctcaccgatgcctttgttcagggagctggttggctgctccagccagcctcggagcactggggctgagccagaggtgggagggcctcgggggaggggagcactgtccacccttcaggatgactctgacagccatgtccctgcctctggtgggcccagccccttaaagggtcggggggacaagtgtggaattcggaggcaggagaaggaggcggctgcggcttcctccttgggcagcaggctctcccccaggctgctgtgctggaggcagcagcctgcatcccgagggcaccccagctggggcagagcagggcccagatccactccctacttaagcctcttgctaagaagggtgccagtccccgatctcttctcactgctgagcctcacggtgcagagctggacaggccaggcctgactgtgcccacctcccaggggacagggctggtctcctccccaagggtctggctctctaggacctccaggacctagcaggggaaactgaggcagcatccacactgctttcagttctgagagagagggtcatcctgttctgtctttggttgaggggaaaccttcagccagctctacgttgggtgtcctcatgttgtctaagtcctggggcagggccccggtggcaggcacatggcaggagatccctgaggactcctgagggcagcggtggcagttgccaggcctggccacagtgagcctccagccctctgccttgtttgatatagactgggcaggggccacggtgaccccccgtcccgggtgtggcggccccctctcccacactccccggcaaggagtcaggagagggcagatgagcatcactgagaccaagccttggctctggcggcccttcctcccttcgcagggcctgggaagcatgtgctcagagctgcatttcaggaaagcagctgcagctcgtgacacgctttccacagcgggagatttatggggctgtgcggctttcatggtttctgtggggttcctattctccccctcatttgtcctggccgctgtctccgaggcagatgggtgacaagcctcccctagctggaccggcccaacaggaaggtatggctgtgtaggggaggggagaggctgaccacctcagcctccttcggagggggaagctgctgggagccactgggggcccacctcgagcagcccataaatctgcgagacctccaggaggtaggaagcctccccgcggaggtgtcccacacacttaggccttgccagggaaaggagaagggccagcagcccccagagtctgtgctgcggccactcccccagggcccagcctgcaagttgtttattcggggctgggcctttcccgccctgtgtcggttcccaacaggcagatgaatgggcagcatctataacttctgcaccggccggacagctttcctacaacctggcccgggcggggagctttgatcccagcaggaggtccaccaaatctgcaaggaggggcatccgtcagttcccatctactcctgccaccaactttctggggtggtgacaatgcagggtcctcagaaggtctagagctcacaggctatggtggctcctgggcccggactggaactggggagggagggaggttttggatggactggggtctggacagaggacagggatgctccaagtccccctctggaggaatctaagcataggctgtgacctagagttccccattcttcaggttgcctttgacggcctggtaatgggtcaacattgggactctggggaagttgaggtaccccaggaaggaagaccagatgctcactctggtgcctttcactgcagccagggacgcgggaagcagcagctgaaaagacacccagggctggacaggccaggcctgactgtgcccacctcccaggggacagggctggtctcctccccagggtctggctctctgattctacttctgccctccttgcccaagggaagtgctcaaggcacccagcctgccctgggcctgcctcctagccccctgccccattggctgtaaccaactccacactgcggcaggctgcccttgttgactctggcccccatggacctggccctgagcccctttcttgcctcctcggagccacggccagccctccagagccccatgtgggcgtctcctgtggggcggaggaaggtgtgtgcccctgtaggcagggcggcaggtgtgggttagggcaagggaagccagtcctcttagctcgcactgtcctggtggctgagagagttcttggaatgaaagaccttcctgtgaaccccagaattgctgagagggagggctgctgctgccccaccccacctgcatgcagccttgttcaccgagctctgtggctggttgcaggaaaggagggtttactgcacagacgaggggtggcccatgggctgagggcaggagacaaagctcagccaggtgcctaggacctggacagcagaggccactcctggctgccctggaactgcactctcttcttgctttcccttgggcatcttttctaggcacccgcctcctccccatggtggagcaccagggctcagttaggcttccagtcagcccaacccattcagcctccagggttccagttcccacatccgaaccctggttttgtctgcactgacagcagagccctgccctgagcagagccccctgggaagagcgtacccgctcacttgcagcagtcagctctgggggcagcaaggctcgaggaagggaggatgaagttgagctgtggactctgggacgcagccgttgagcacttatgataaaaccagaagcagcagcaggcggaggccaggctcccctccccaggcagggttgaggggctctgctaacatctgcctcattgacttccttgtgtccacttcagagaatggccattctggcttaaggcagtgacctcttcctgtataccagcagtccctaatttgttgggttttttttgtctgttttttgttttttggtttttttttttttttgagatggagtttcgctcctgttgcccaggctggagtgcagtggtgcgatctcggctcactgcaaactccgcctcccgggttcaagcgattctcctgcctcagcctccccagtagctgggattacaggtgtccaccaccatgcctggctaatttttttgtatttgtagtagagacagggtttcaccatgttggctaggatggtctcgaactcctgacctcaggtgatccacccacctcagcctcccaaagtgctgggattacaggtgtaagtcaccgtgcccagccagcagtccctaatttaagggctgtcagcacactgctcatctccctggtctgacctcaccgtctgcctttctgagagcaatctcatctcctttctgaatacatggtgggggatcctcagcagagcccccctgttccagcgttgttgaagacaacttttaggacatcaatgcagggacagtgggagttcaggcatgctaagggccgaggctaattagcttggggtgagtttcatcgtgtgggtgtgtcttagtcagttctgggctgctgcaacaaaaccccttagattgggtgattgataaacaacagaaacttattgctcatagttctggaggctgcgaagtccaagatcaaggtgccaacagattcagagtctggtgagggcttgctctctgcttcagaaatgctgccttcttgctgtgtcctcacacagtggaaagggcatgggaactagctgcagcctcttcttctttcttctttttttttttcttttttttttttttggagacagagtctcgccctgtcccctgtcacccaggctggagtgcagtggcgtgatcttggctcactgcaacctctgcctcttgggctcaagcaattctgcctcagcctcccgagtagctgggactacaggcgtc[143 bp omitted]gatcctcatgatttgatcatgtcccaaagaccctacttcttaatattctcacactggatatcaagttccaacataagaatttgggggggggggtactaacattaaaaccttgatagggtctaagaggcccgtcctcgaggccatggtcctaagatgggcagagctgcccatagaccactgtgccaagccccctggttgggtgacatcacaggtacatctgggttgggaggggcgccaggttccatgtagcccagagatccccatcattccttgcttcaagccagaggttggtcggaggtgacagcagcctggtggagtgccgtgtgggtgctgatgctcatgctcccagacctgcagggcaggtctgtttgaggtcactgttgcaatgcgcattttgaatattttcagctgtatgtgcatggcaggggcttggcccatgcactgcatatgtagctcatacttggtgagctgtgtaatgtgtagaggtgttgccaagggcagcggaaatgtggcctttttccagcataatcatgagtcctaccactacctgtccctgcccctgcggccaggacagctcccacccctggagttgctgagatctgctgggggtggaaggacaagggctggttgctttgtcctgactgaccactgtccattgctctatccctctggactcccggcagcaaggtgtccagaggaaggtacctttcagggctttgcccttggtgttaggcagttaagcaggtccccttcaggaccgtgtggcagtgcctggagaagcacagggggctgctttggatgccatgcctggtttccagggcattcactgatgggggaaagctcagagaccagagagggttgggcagggctcactggcccttctgctatgaccccagggagtgagaaggccccctgggaggcctctgcaggaagtctaaggctaggccttctccagccagctctttctctagcctcttctcagcaaacttgagactctgccagctctgcccttctgcctggccctgagcagaggcccaacatccccaaaatcttcaagatgaattgtattagcttctagggctgccagaacaaagtaccacagaccgagtggctgaaaccacagaaatgtatttctcacagctctggagtctggaagtccaagatcaaggtgtcggtagggttgctttcctccaagtcctctcctggcttgtagatggccaccttctcgtgtccttacagggtcttccctctgtgtgtctgtgtcctcatctcctcttacaaggacacaggtcatagggcccaccctaatgacctcatcttaattatacttaacatttttaaaaattttaatgggtagttaattatactttaaagaccctatctccaagtaaagtcaccctgtgaagtccagggggttaaggtgtaaggtttcaacagaggaatttgttgggacaccattcagcacacagcaccaacagatgctcggagcctgggatcaaagctgagctctcctggagccccagcccagggtgccttctgcagcatccttgttgggctgctccagcccatgctggctggggacaccacagctgtacaaggggtccgaggtgtccagcacggcagaaacagccatatcccgagctcattcgtattcagctcagtcctggggagaggaaagcggggctctcagggatgctgggggtggctcccccattgcttagctaaggggcactcagttgccacggtgacctctgtctgcacagtcaaatacactcggcccagccacttctctgggctggagggctccccccacccagagttcacactgagtgttgagtcccttggtgacaaaaacatggaaacggttgccatggcagccattctttggagccctcagactggagtgcaaagttcaggatgcccaggaacagctgaaatgaaaatacgggaaaatccgcttccctcaccctggaaggatgactcggttggcattcagtgctctcctgcactcggctgtccctgccctccccatcccctggtccatgtgtgggtgcaggggggtgccctcggagtgcaggagcagagtggcccccagagacgttgacagaagccagccagcataggagggcaggctcagctggggtggttccattgtctggagtggtaagtggggaagtgatgactgctggacgttccctggggaggtgtccttgtggctgctgaagccacagagcttgcctgtgtgttggtttcttcaagctgctgctcctgtctcaggagggctcaagtctactccatggcccagcctggggaataaaggtgtttcgcccagtgaaggctacagtgtgtgagggtgggatcagtgaggggaagacagtgcggggcaggggagtgagtggatggctgtttctcttgaacagaggtgagtacagcagaggcccctccaggtaccccctggtctgggggcaatgatcatgtgtccacccccagcaggtccccaagaaggccccatgaggctctggtgacctgagatgcaccaaccaaagggttctgcagtcacagttgtttgagaaaccaacacacgtatacaggattcttaggttaaaggctctgaaaagtcttgcagtaaggaacctcttgactttgtttaacctagtatttcacaaacttactagagcaaagtttctcatttatttagcgtctcttatttttgaaatctcccttactatcttgcagaaatgacatctggtaacatttgtcctctgagtcaatgacatcggcaccacttgtgagaaatgcatattctagggcctcacccagatctgttcaatctgaagctctggggcggggcccagcagtgtattttcacaagccggccaggggattctgatgcatgctccatttggggaagtccttctactagggaaaatactggcagagaatttggagtaagaggaatggtctggggaccttgggcggcatggaggaagggaggccacctggtagggatggcttaggcgtgggaagcggcagtccaaggttcccggggctctggaaaaggcactacggccaccccaaagggtgggttctcatcttctgtccctgagcattgaggacccattatggttttctgaggctggttggagggccaggctgtgtgtggagtgtcatgagggctggtgtaaagtgacttgggcctttggagaagcgcacccctgaggaacctccctctccccgccagcactgctctcacccgagcgcctgccctgggcagacagcttgcccagagtgctgggggcgtggtcagcacctgtaggcttcctggacaaagtgggccttgacaaggccaggagatggcttgtcccgacggcagtgctgggtggcaccctcacagcgtgggaggcaaggcttcttggccctgttgttagcaggtgggggtctacgatcagcttgccaccacccacgcgctcctgtatgggccactctgtgcagtcacttcctggggctgggtctcctttcccttctccccaggctcaggcagggcggacctagccacagcagctgggagcccacccgtctgcctgtgcttccttgcagccgtccagatccacatcctgaaggcggacaaggcgggggactggtggaagttcacggtgaacatcatctccgtgtataagcagggcacgagccgcatccgccgcggtgaccagagcctgtggatccgctcgcgggacatcgcctgcaagtgtcccaaaatcaagcccctcaagaagtacctgctgctgggcaacgcggaggactctccggaccagagcggcatcgtggccgataaaagcagcctggtgatccagtggcgggacacgtgggcgcggcggctgcgcaagttccagcagcgtgagaagaagggcaagtgcaagaaggcctagcgccgaggcagcgggcgggcgggcgggcgggcgccagggcggggccgagcgagagcgggcgccttggcccggccgccgcggacttggcccgcgagggctttcccaggtggggggagggagggggcggggccgcacggcgcggggggcgggaccctcggcggcccctccccctacccccaccctgcgcgctctgggcgggagccgcgtgcacgcggggcggggtgcgccgccggccgggccctggagaaatgacgagacgtagctacctcacggggctccttccagagcagagacgcgcttccctgggcctgggcgcggccgccgtggaggggctgggggcagcctgccctggggcccgggggcgggcgcagaatcgcacaactggggccccaggcgcggggcgtggatggcgcggagacgtggacgggaggagaactgtgaattctcaagcccgtagtgtgggcggggcgcggagcacccaccaaaccaccacccgacacgcagccgacgggatccccccctttctccccggccccttctagcagttccccgcgggccacctggctgtcacagcctggactcctccatctgaaggggcctggcagcatttggggagtggacagctcctgtccagccagcatgccccaggcggcctctgtctccactgctacctgctgagtgggtcctactgggtgggggcttggggtcggtgagtggttcacctgtggagagaggagaggaagcccctgctgctgcctgtctctgcccctgcccctgcccctgcccagcgtggggctggcccatccggaaggcagtgggcccagggacacccctgagaagcccaagccgggtggtcaccgcctcatgctggagctgcctgttggaggaggcatcgcaaacgcaaaacctcccagagagtttccttttggaaacttggaaccagccctttttatgacgttttccagggggagggggaggggcactggctgggtttacggcagtgacactatttatgtaaatgacatcagctcccgcaaggcccctcagcaatgtcaacagctggaaagggcctgaacgggcttggagtctgcaggctgcgaaggcacttgggcctggcttggggccgggggcttgtttgagctgggatggggtttgctggctcagtgaagtaccagagtgcctgagccatgggtgggcaggggcacaggaatgaccaggttcctgggggccaaggaggccatgctggcttctccaagggaaggcacagaggctgccggcctgccccctacagctgtcttgggtctggcctgggccacaccttgaccgtgcctttccagacggtctttgtggagtctgcccgtgccctccactgtgccccagccctccttccaaaatctcctagagacacggtcctcaagcaggcagccccttttgttctgacctcctcacacagggtccattcctgtgccctggggcctcctggctccctgccttcctgggctctctgcactgcccgggcctctggcccacatcctcacacccggcgcactgaattaagaggcctggctcccctcacagtcaggaaattggtttcactttcccggccagagtttggctgctcaaaagggtcataccaagtatgaagctcggcccccggtggtctggcttccctccgccttccccacatttacccgcatcacggctgccatttattgagcacctgctgtgtgccaggcactttacccacatgctcccagtgtgtactcatgacaaccctgtgggacagggactcattatcaccagcaaggagactggagtacacgtgcccaaggtcatgctgcaaattggtggcaggactggggctcaaactccagagcccgactttctgaccaggggccacgctggccctcactgcactccagctctgcagcctacccgcccaatccctgtgcaggctgggagggtgctcttgggggagtggccaccgagcccctggccctggttactgcctcttgaggacactggcatctgggctggagaacaggagcccggggtggggtagggcatggggacaatcacatcttcagaggaggcagcaaagtggtgcgggatgcagggacggacttgccagatggcagctccaggttccaggaaggcaggccttggatgctccgaagaggtggtagaaaggtgtttttagaaaggtgttttggctgcctcagggtggttggagagactccaggagagactggcagaggtgcctcaggggcagggagcagacagacctgccctgggaaggggcatttggcttccctgaatccagcccaaggctagaagacagggcccctctccaagctgtcagcgcccctcggatgcccagtgtggtgtgctgggcgccatcagcatcacaaggcactacgctgctggggcggttgtcctatttctgtctatgccagtgtggtttcttcaccctgcccagaagggctgtggcagccccacgatatcccaccctgggtctgggtctcacgggtgtcctgtgaggggcttgcatttgtggtggtctctgaggccacctcagcaacggagctggcgacacgccaagcaacaaggcatcttgcggaaaattcagccagtgtcctgcccctcccttcggctcagcaccccgcagggcacaggctgtccgcccggtggtctggcccttggggaatgcgtcagggtgaccagatccaccatgctagcagccaggtcactgttgggattgcacggtcgtcacgagctgcctttcctatccacacacccagccaggacccagcccaccactcccgactgcagccccggcctctgcggtgagcaccatccttgggaaagcacccctcctccactccggtgccccactccaaggagcagagggaaatgggaattgaggtgtcccggtttgtacagttaggaagggatgtaaaacggaactagattttgattttgaagagtgtattaaccagaattgtgctatgtaggtgtttgtttgaagaaaaacataccagattagtctttgtttttgaaacagcttccccagttgtcctttttcttaccagctgggtggtctggtgcccctgacagctgagtgcctgctttacggacacgcagtaatgccgaagatttgcgggggaggacatagggctgtccccgggattcacctgctggctgtggtctctgcccactgcttctgtccttggaaagcagggcaggaggcagcatccccaggggcctctatgtgggagggagggacacctggggtcacaacccagggagggagggtcacagcccagggaggctgggagctgctccaaggccctggaactctgcctcagtcgcggcatgctggagaggggtacggacttactttcttggagttgtcccaggttggaatgagactgaactcaagaagagaccctaagggactggggaatggttcctgccttcaggaaagtgaaagacgcttaggctgtcaacacttaaaggaagtccccttgaagcccagagtggacagactagacccattgatggggccactggccatggtccgtggacaagacattcctgtgggccatggcacaccgggggggatcaaaatgtgtacttgtggggtctcgccccttgccaaaagccaaaccagtcccactcctgtcattggacgtttcttcccattccctcctcccaaatgcacttcccctcctccctctgccccctcctgtgttttggatttctgttcactcagaattgtaaatgtttagttgtgaccatgacgtattgtttgggtcaatgtccctttccaatgcatactaatatattatggttattatatatgaatatatttaatgacatggaaaaagttgtggattttctttctttccttttttttgggggggggtggggggttggttagagttgtaatggacccagatggaacttgtaatgtgggccccacatgatagaactaaattcagatatcattaaataaactcttgtacactatgccgtctcgcagtcttgattggtggcctgggctgtgggaggtgggcgtgtggggaggcaggggaaggatggagttttcggggagtttgaggaatatggcttcaggccgaagaactcccctgcaagtcagagcctgggttttacccagagcctcagagacagagccctaactaactcccccgagaaggcaggagaagagcagttttgcttggaatgtcctagggccttgctggccgtgctgttttgagctaaaaggttctcgaatgggacagtctgtattgcaggctgcaggaaaccactccagggacccatccttgccattccctggagttccaagacagagtggggggaaaggggtcccctcccactttgccttacctgcaacccccgggtgggcggagagccacctttgaccctccccatttgattcagaacctgcaggtagtttctgacttttacataactggcttcttctatgaaagccaagtagagactcaagaaactacagcagggttagtgaaactcaagagatcttgcaaaatattttttttcaagcgattgctaaaggcttcgtgcggtgcagagactgggccggtgccagcaccacgcagccaccaagagctgagctcacttggtttctgagaggctatatttaaacctccaaatggttgtgatttctttattaaataaacaattcagtcattaggaacatattgtgttgccacgcaaagtggggccgatcatcactaggaagctataatttctgcacccagctgttttgaaggcagccctccgccatgggccccgtctagcccctcagcaacgcaggctcaacaggcccttccttcgaaggtatggaaagccccttccctgctgtgtggagagctgactggagatgccattagcttctgctcaggaagaaatagggccagccctgctgccttgggggtctggctctgcggatgggagctaggctctcaagagcctggggtcaaagccagggcaggtacatacgtgagtggtctccgggtgtcccaatcagtctcaggtgtaagtctctgctgaaatgacaacgcctgacagtgggtgggcagggatgacatccaggtctcagttggccagacaggctaaggagaaagcaagcctattccggggtctcaggtgctccccagggccagcggggccgctggtagcatttaagacccgctgagagactgggctaagaggcctgtgatgcacttgaggcagcttcattctcagctttggtcattttaggtcaagggtccagttcttaaggactttcatgatgtggctttttttctgtccatttaaaaacaaaaaaagtgcgtgtctgagagggccgcgtttccttgggacgccaccacagtcgggccctgtgagggtggctgcagccccaggcccacggccagaaggaagcacactgttgctcagagacacattagaacatgtactgtcaacggcccctctgcctcccaggaccttatgctgtagttggggagagagggcatctgccaaactcaatgcaggaaataagctgcgttgctgctaaggactggcccaaggtagtgggaaaagcccattttagagacgggaatgcagagtcacaaggaagctgggtgatcaccatcagggacccagaagccagtgctatccagtaagaaatgcctgatggtgggtgggcagggacgtcagagccctgtgggtgtcagagcttcatggggcctgcccggccacctgacctgccaccagggaggctcagtcattcataaggctctcccctgcccattcccctctgcctctcagagatagtgatggcagagacaagtggcatgggaggcccacttgtagcagacacacccttttcagattttgttgaacagacatctctttctccactcttcttaaaactaaataaagacatataagaaataggccaagaaaaatggggaatgaaaagaacaacggagccagtaagagatagaggatatggacggattacacacctgccttatcagactggagcctcagcgggacggcaagtcatttctggaaagagatcaatgtcttttgttattgacatgtagttgggaggaagtctgtgaaattgtaggaagcaatcggaggaaagatggatcttggccccctttttaaaataaggggcaaaaacgcacttaatttcaacagggctgagttagaaaatccaactaagagatgatccttaactagtctctgcttaagataccagtgtcactgtgaacctcaagaagcagggcatacgattctaaggaggctaaggcactctttcctgacctggaggaacaatgcggctgtttggccagccagcagttctctctgactagtcaggagggagcctcgcaggtttttgttttgttttgtttttttgaaacggagtctcccactgtcgcccaggctggagtatagtggcacgatcttggctcagtgcaacctctgcctcccgggttcaagcgattctcctgcctcagcctcccgagtagctgggattacaggcgcctgccaccatgcccagctaattttttatatttttagtagacacgggttttcaccatgttggccaggctggtctcgaactgctggcagtttttggagaggggccgtcggcaacctgcatcagccacgtagaaggagagtttcagggatctagctcatggaaaaagcccaatcccagccaggccgaaggctgcaggcagcagagaaagaattttccctatcaaagtcacaaatgactggtggaggccgtgtctaggctggggccctgcgggttttgaaaggagctgatcgtcttggggctaatgatagctaaggtttagttacagttactaataaaaatgaagtttaaatggaacaaaagtaccagctgtacccaggtatctggatttctttatatggtatccagagttaaaatgcttataattaataatcggttaggttaaacagtacttacactgttattttaatcacggtttattttcattgaaaaagcacccgacatggtggctactaaggccctgccttacctctcttctttatgcttggggtgagggctttaggcttgcccagccaactccaaagcactcactgtgggtcacccaggactgtggtcctggcagctctgaggggggacagccaagcctttcaaaccatgctggaaaatgccacctttacattagccacgctctctagggtggctcttgaggcagcaaatccccaaaagggacacatcccagccacttgggtaatgcttgccacttctggcctggttggggtgggggtctcatatgtcacccaccccttgaggaaggcaaaggggagccggggttttcctacccggcccgtccccaccctgtgtggcctgcgctgccccaagcctagacggcaggtccctgcattctaacctcctgggtagctttttatccaccctgccctgcctgtgggtccacagaaatgaagtaacttgtccagggtcacacagctagcagtgctggggtcgggcctagagcccattcagccaaaagaacagaagccgctgtgtgcagacatcggctcagtgttttgcttgaaaaggcctttcagtctgactgagccaggactccgtggctctggttcaaagacgccccacgagttgccggggctccgtgctgagcaagtcgagaggaggtgagaaagtcaaacagactgtcaatgccgcctcccccgagccccaaagtggggggctccctccaaggagacactgtttgtagagatttggggtttcgcacaagactggaagatgaggctctgcagattcttgatcgtccgttggatgatccgttagcaaccaccccaccccgacgaggaggcgcatcccagggcgccttaccagaaagcccttggtcccctgtccagcgtggctcctctccttcaggaacacacgcacctacaacaagcccgcttcctttccttctccttcctgtgacaatccaggtcctcggcagtatggctcatcctcactgctgcccctgctcctcatcctctcagccctttgcacctcctgtctcgacgcagcccgtttcattcttctaactctgcttcaagggcctcgacatcccaaggctagcctgggtctgcatgtgttggcagcttctctggaagcagggatcaggctccatagagacaggagagcccttgtcctgggccctggttcacgctcacatcctcacaacagtctgtcctattgcactaggtggaagcatgggacaggatccccaagatgtggacttggaggcatctggcccactgggcctagacttgggttggggaataaacttctttttttctttgagacggagttttgctcttgttgcccaggctggagcgcaatggtgcgacctcggctcgccgcaacctccgcctcctgggttcaagcgattctcctgcctcagcctcctgagtagctaagattacaggcatgcgccaccatgcccagctaattttgtatttttagtagagacggggtttctccacattggtcaggctggtcttgaatgcctgacctcaggtgatctgcccacctcagccagaaggaactttctttcagcggagccaagcagggcgctctgtgcttgtgtgtgccaactcactctgtcctcgcagcaaccctgtgaataggaaggacacctcatctccacgccctagacaagggagcagaggcagaggaaggtaacttgcccacggtctctgagctggtaagtggtgtggctgtcattagggccgttcactgcatatttcaggctcttggccttccagacacttcctggtcccctcgtggtgaagcaggccaggtgatgagctctggccagtgagctgtgagcagaggcaatgggtgtgcttctgggctgcacgtgtcactgctggcgtgagagcttccagagctcccttgtcctttgccagagagaccatggtggctttcccatctgcctgggtcagagctgggcaggtgtctgggctcctagaccccaggtcttcccgggacccctggagccctcagtccctaggaaatgacattacaccaggctacacgtggctctctctctggtgtctctgtccacagggggtttcaggtcatgccctcttgagcaaatccaccagaaactcacctgctgtgaatcccctaccttcttctcagtgaaatcttgtgctttggaaatcacccatcatcaaccctaattctttcccctttcgtcctggagggcagagcaaggccagctggcctagcctgctttccacacgtataagagagagcacatggtgcttggccccctgacccctgctaacacgaactcagccatccatgggcctggcgtcctccgcaggcctgccccatccgtctgccctttctgagacacacacacgtacacatgcgctgcgcacactcaacacacagggctctgtcggagccaggtgaggcgccacggtaatctcatccctctgaaccctccacagtgctttccagcccgaccacctcctgccccacctgccttattccacagacttgattctggctgcttataaagatgtgtcagccctgaaagatgagagttgattgtcaccaaggagatgaaaaagaatgcgcttccagggctaatagcagttcccacaggaatatttttgtgaagtggaggctggcacccctaggaggagtgctgagcctggcggggtgactcgggtggggcagagcagcacggtggtggttacacactcagacacaggcctgtgtggctcctccgcacagccctcacctcactccttccccgctacctggacacacgtggccttgaatatacacccatttcctacacagacatgtggcttccacaagcaggccagacgtcaaggtttcaaactgcctattaatccagtgtccccaggatgcccagagtactgcggggtggccagaacccactggccaccatgaggtaggggaccccgagggacctccggccagcacgaaaatgaccaaagtcaaaactcaaagggccacaactgggcccagtgctctaggcagctctccagagctctgagtctttgtttttttgttttttttttctttgagacggagtcttgctctggtacccaggctggagtgcagtggcacaatcttggctcactgcaacctccgtctcctgggttcaagcaattctcctgcct[229 bp omitted]gctttgggggaatttattgagagcaggttttgcgtaccaaaagggtgttgggcttgcatctgtcattggcaggtgtcactgctggtggtctctttactgccatcagttggtcggccagactgcaacaaccacgatagccacaagcagcagtaaaatcaccatgatcatccctggaaaaaagcagcagaaaatactacttttaatgattcctaccagaaaagcatcacacattctgagtgtctgcagagactcagagggatgtagttccctctgagccttcagtttgtacgaagtggagagaggtggtcggtggcctggggcgccgctgctgctacacagctctggctttgcaggatgctgagtgcagaaggcaggggcctgggtgtggccaggcccccccaggcagcactcaagccaggagggggtgaggcccctaactctagcatctgtgtacaccttggaccacaagggagggcgcaagctgctgacgacagccaccctcactacccaatcagattatgcattgatgacgcattgataaagcaaagggcttaggagagcattctagaacccatttctccattctccacatggcttcactttgtgttcttgagtccaagatccttaagtcacccatttgtaaaaatattcaccgatagaggtgcttgttttgatatatactttttctgctagtatttgctagtttcatttcctgacgtttttggctggagagcacaggccctcctagccagcccatgctgggtgccactctgccttccagccccgccctgcctcctctgggtcgtgtgtctgcactgaccattgcctgttccttcacctgatgctgatgaagtgggccccacagaatgcagccctcacttagtgcaatgagctcactgtctcccatgttcgcttgcccagtatttaacgagtgtttaccacgtgccaggtaccagcggcgacaaggtatagcataacagagaaggggcgccctactacaaagtaagcactcaagaaaggtttgctcactgaagagtccttgagctgccaaggccccacgagagaggtgggtagcagaggaggagaggtccatgaaaatgcttcagaaagtaacagggagagccacgtgtgcagggtcacatggttgcacagccatcaggactgctgaacgccacggtagtctgtggcatatgttcgtgagcaaagaaaatgctaaatttcaattagacatttgtgaacataagagtccaatttgctttccggtccaagttcacgggcttcccgaatcccctccacagatcctcagggttcaatgtggatcaggccataccaatcttaagctcaacccatgtgggcactgcaccatggttttgaatattgaagagacttaaaaatgtatggcaagtggctgggtgcagtggctcacacctgtaatcccagcactttgggaggccaaggcgggcggatcatctgaggtcaggagttcgagaccagcctgaccaacatggtgaaacccc[315 bp omitted]gtggcaggcgcctgtagtcccacctacttgggaggctgaggcaggagaatggcgtgaacccgggaggcggagcttgcagtgagccgagattgcgccactgcactccaaactgggcaacagagcaagactctgtctcaaaaaaaaaaaaaatattagccaggtgtggtggtgggtgcctgtaatcccagctacttgggaggctaaggcaagagaatcgtttgaacacgggaggcggaggttgcagtgagctgagatcacaccactgcaatacagcctgtgcaacaacagtgaaactctgtctcaaaaaaaaaaaaaaaagaaaacgaaaataaaaaaaaaaactagggcaagcttctttgtcatctacctgtgactgtggttgcatttttctgatatgggctctttctctgatgatccaatcttttgagaaacgcttctcttggggccccaaggtttctcccccgtcttcctgtagatgaaaacctcatcctagtctacctcaaggctctgccaactttggttcatgggccaaatctagctgtgctctgtttttgtgcaacccatgagctaacaatggtttttatatttgtagagggttgtcaaaaaggtaaaaggaggagatgtgacaccgtctgtggtctgcacagcctaaaccgtttacgacctggcctcttccagaggcttgctagctcctgctctccatcatcatgatgatgacccacctgcagcatcagttcgcccacttaggcgctggccttcaatgcgctcttcatttctttcatctagggatttcctttcttccttgtaaattcagccctgcattaacatttgtgggtgggtggagttacactattttacctcacatttcaagatgcttgcagcaagaaggcaggggtaggggtgtgtgtgtgtgtgtgtgtgtgtgtgtgtgtgtgtgaatatcttagtccatctgcagtgagaaggtagggatacgggtgtgtgtgtgtatgcgtatgtgtgtgtatgtgagaatatcttagtccatcttcttgccagaagcagaagaacaaatcttttcactgatttctgctccagaaacatcttcaggttgaccaaaagctcccctgggcaggagcttcactagttcttggttattctggtgcctgtgtggtgatcagctgaagacttggtcctggctgggtgaaggtttatgttgcgcaacatgaggagaagataacgagaatgaggaggcaggcacaggctgggatggggcgaaggggcaatccctggcactccagggcctgggctcaccctaagatgacagggaggggctggcagctgaggagatgagggagaggatgagaggtgttttaggaagaggtactgctcctgaagctccagtgggatcacagttgggaggacacttgggcccagaagctccatgcatcaaggcaggctccacactgaggctctgatggcctggagcagaggccagtatgaatgaccgtgaattgtcaaatcagggtgattatgagaagagcggagcaagtgacaagaacaaagaaatcaagaacaacaactgattgggaagaagaaaacacacatctggttttggttcatacacccggagcgtgaggtccaagggaagaggcctcaaggcatgcgcagtcactgccatccctgatttggctccctgcagtgagggactgctttccccggtccctgctccacgatggaactacagcaagcttttcagaatgtaaaggagatcaggtcacctccttgcttaaatcctccagtggctgaaactgagatccaaactttacagtggccaagggggtcttgcacagtctgacccagcaaccctgcagccgcactctgcgcgctgtgtttgagccatcctggctgtctccggtgcccccaacaggctgatgcagaaggtaggggccctgcctcccagcttcgacacgcgctatcctttccatccgggagctccccactcgtggtctagttaatccctcaaactcagtggcattttcccaaagaactctttgtcatcctccagttacctgtgccctctttgcccccctaagtttccatggtaactcttattaaatcttttttttttttgagatggagtctcgcgcccaggctagagtgcggtgacgtgatcttggctcactgcagcctccgcctcctgggttcaagcaattctcctgctttagcctcccaagtagcggggattacaggtgcccaccactatgcccggctaatttttgtatttttagtagagacagggtttcaccat[140 bp omitted]ggacacatgaacatctacaccagggactgtgggttctcgttcaccgccatatcccccgtacctagaacagagcctggcacaggaaagaggcacacacacacgcgcacgtgtgtgcatgtgtgtgtgtgtgtataaaacaaatgagtaaatgtattgaatttttggaagggataagaagagtcaagagaggcatagaaggagtggtcagcagagagggagaagctgagaaaatgtggcaagaaggccaatgagtaagaaaattcaaaaagtggccaatgccaacccacaatactacagagacaagatagaagaatgctcttccacagaagagctgcagagacctttcatagtacagttttagcgcatggtgggtgggtctagtggaactattattaatacagtggtggctaagctgctaatttttctaccacagatgctgtgaattagacaaactgtgccccaggaaag[137 bp omitted]acagagaaaccacgtctctactaaaaatacaaaaattaaccgggcatggtggtgcacgcttgtagtcccagctacttgggaggctgaggcaggagaatcacttgaactcgggaggcggaggttgtggtgaactgagattgtgccactgcactccagcctgggcaacagagcaagactccatctcaaaataaataaataaataaataaataaatatataaataaataaataaataaataaataaatgaaaatgaacttgagtgatggacatcttggacagtaagctgataagatgtgataaactgggttcttgtcccaagatgaaaaggaggattttaggagccatgacaaataaggcttttatattttaaaccctttcagagcaaacagggggagactttaaacaggcttaagtaaactggtatatactgagggtcaactgaggaggtcgttttaagatggcaggtgacagcgataagcaaaagccaactgctgtcttttggattctttgggtcaaagagaaggtgtttatctaccttagcacggcaatcctttttctttaagaagtttggctttcttcgaatgtgatcccagctctggcacctttctgaatggagtttctctcctctgaaggatgtttcggaatgagtaagcagggatctttttgaagccagggaaagctgagccacaccgttcatgaaacagtcatgcgtgccaggtttggcactaagtgctatgggtgtattacttggtttaattctgcacagtaagtaaccctcatctctgttttatatctgaggaagctggggttctggaaggtgaactctcctacctaaggccctctggcgggtaagaggaagaactagaattggaatccaggtgggtaggacccctctgcccacacgctcacccttgtctacaccagtggagcttgagtggaggcatcctgattcgagacagtgtgggggtccctcggggagagaggctcagactcactggggttgaaacaccgggatcaagagtttcttctcttttcatcctcttctctttctccctccctccttcccttccttaacgttttatgatggaaaattttaaacatatacaaaagcagaccgaagggcacgcagaacagtgatgagcccatccgtcagctttcgcaaggatccattcatggcctgtctggctttatgcaaaccctcacctgctccctgtctcctgcatattattttgaaacaaattccagacataggtcatctacaaatatttcagtaagtatcactaaaaggcaccattaaaaagacacacacactcccccactacccacataaccacagagggtctgacggttcctaaaggcagaggcagggaagagctggcaactcttctgatgtaggaaggtggctccagtttcaggggcgcagccgacccccctgccggagggacatgggacctcacatcgtactcggtcacgtgtgaaaagcagaacttccttcttctgcctcagaatagttcttaaacctcaggggggtctactcatccattcccccagctaaggaaatgtttgacatttcagaacaaggaaagacagttgaacttctgggaggctgccaacttcttaaacaatgaatgctctctgcccccaaccctagcacagaacacctgctgcggctcctgacttcgggatcgtttctctgcgcttcactcagctcctgccctgggcccgctggcacctggcgaggcagattttcccttccaatactcaagagtccctttcaggggcaggcatgggatgccagggttacaagagtggaaaaaaatgtccatttcctttggtcagtttaccagatgagtattactcaaccacttacaatatttacaagtccagctcatggcaattaaaaaaagatgtaagaaaacaaactccttttcaaactgggagaggatattaaacacagtctctcaggaatggtgttttctgaagactcgtcatctggagtcatggtccatacttttttccagtgaaacactggaaacgagcaaaatacggagcttgtgctgccaacgcccctgccacaagttgggtgtaggtaacagctctcagtgcttactgacatggaggaggaggggaaggaggagaaagaatctggaggctgacttttcgagagagtgtggatctctgtgttggccacttctgccctgtagctgcaggggaacgtggcaagtaggctgatgggaaagcaagaggcagggaggggtgaagggcgctttatccaggagtctttttatctggttttgttgcaaggaaagccgccttagctgcctactactattttggttgtcttgaaccaaaacacatattctggccaggcgtggtgacttatgcctgtaaccccagcactttgggaggccaaggcgagtggatcacctgaggtcaggagattgagaccagcctggccagcatggccaaaccccgtctctactaaaaaatgcaaaaattagccgggcgtgatggcaggtgcctgtaatcccagctacttgggaggctgaggctggagaatcacttgaacccgggaggaggaggttgcggtgagctgagattgcgccactgcactccaacctgggtgacagagcgagattttgtttaaaacaaaaacaaaaacaaaaaaagcatattctttttgtttgcctcgcttttcacaccagaagagttaggccaactggcaacccacacgtagctactaaacttaaagatgaacagaggacacttcttagggacaattcctaaagtttgttttatttttttggcagttgtgcctgtcaataggtgacatttgcttatgtattaaccagtgatcagtctcactgttcaaacagacttttcacggcagactcctgagctgaggtggggaataagcaggagaagagacaaaactggaatatttatcttcaaaagttcatgtaaatgttccctttaatcccacgactgggcaaatacacgaagaaaagagtagacgccgtgcagagaaggtgagcgtatttacattctgatttccagattgagaggctggagaatggtggctatgcttgaggtctctgcccagacctgcccactccaggggctgtgtgtgctctgctgggggacccagagtgtgacactagcagccttcctacagccgctgctcagctgcgccaggggaaaccaggcactgggggtgtggagaggaggacctacctgcctctgatcacacccctcttgaatctatcttaccccacagttctacattttaatttccgccgaataatgctttcattaaaacactgggcaaaagtcatctctggttttctgagtttgttttgttcttagcctggcatccaactcaactctgcaggtttttctttctctgtattgtgggccaggcttcctctgtggctccagggggttgcatctgactcatcaatggagtctctgcccgctcccctctgagtgtagcctcagcccattttccacccgccccagggcagggccgaagccttgaaggctcatcctctgtatttcatgtcctccatgaagactgctcagcccgtacacagccagcttgtcctggaatccgagggtatctgcagcaaggccattgctcttaaatgactcccttccacctttggttctttttttattaataattccttcctcaggccatagaatctccaaaaacagatcaatgcagtctggtgcggtggaaggggtactgattttacagtcaagaagacctgacttctaatctgccactggtatactatgacacgttgggaaagtttaactctggagctcagttctaccatctctgaaacaagactgaaaaatcctgacttcacaggcttgttgtgaggatttcggaagatacagtacatgaaacttctagaacataactggcactcaataaatggtaactctcccaacaataattattactcctcgtaataattacaccctgcctgaaacgggtgcctagtggtcgcaggtgctccgtaaatgtcctgcaacagagccagtctctcagcttaacaacagaaatcaaatgtcactctctccaaaagagaaggaagagtagcaaaaacagaggaacacctgggtggcatttagtgtagaaacagagggagcaattctctccgaggcccggcggtgatgagggcgtccgggaaaggttggaagttcagggtggaatgtctggcagcctctgtgtcagttattagctacaggaagggcagctgtgctgggcggaatgctggcggcggtcagcaggcaggcagaacacagccaagtggacaccaggtgagaggaactgtgaaaggcccagactttttaaaagccagtgaggaagtggaggtcagagcaggggtcacaggacggggtcacaggcaggaggaggagaaggttaaagcaaaccacaaggagcacccgactttataacacattcagctacgcgggagaaaaggtggagaggaacccaggggcccctaggggagcctgtgcgtctggccatgctgcataaataacaataataataatgacgatgaaaataatagtcatagtgtccgggcatggtggctaacgcctgtaatcccagcactttgggaggtcacggcgggtggattgcatgagcccaggagttcaagactagcccgggcaacatggtggaaacctgtctctaatttaaattttaaaaaagaaaaagaataatattaatagtagtagtgtcacaagaacagaagtcaagaataaagcctgggcaacaatgcgagatcccacctctacaaagagtatttttaaattagctggctgtggtgatgtgtggctgtaatcccagctactcgggaggctgtggtgggaggactgctggagcccaggagttcgaggctgcagtgagctgtgattgcaccactgcacctcagcctgggtgacagagtgagaccctgtctcttaaaagaaaagtcaagaaggccgggcgcggtggctcacacctgtaatcccagcaatttgggaggccaaggcgggcggatcccctgaggccgggagtttgagaccagccgggccaacatggtgaaaccctgtctctactaaaaatacaaaaattagccaggcgtggtggtgcacgcctgtaatcccacctactcaggaggctgaggcaggaaaattgcttcaactcgggaggcggaggttgcagtgagccgagatcgtgccactgcactctagcctgggcaacagagtgagactccgtctcagaaaaacaaacaaacaaacaaacaaacaaacaactgtggtcttttggggtggctctttagagtggccaggccagtgtcccccatgtgcctgggtgggtttgtgctgaggcaacactgggaagagagaggcacctggcaccctcctcaccctggaaactcagccctctccccagaaggccaggcccctacctggagagaattcactcccagcctgagctggtgcccagcaccgggctgatgaggcactgctctgcaggaacacagaaacgtggaaagaatcaactggaaagaaggcagcaactgtcggaaaagagaacggtgtgaagagagacatctgggggccagagggagcaagagaatcaggagaaggtggcctggaaggggtgggggttgggatgagagaaaaaaaggactggtctagaagcaggaaattaaaaggaatgaagactgcaggtgacggggcagagagctggacggcagcctagtgaaaggcaggttcctgggatctggggtctaggatccaggcatgagcacctggctgggcgtcaggtggccgtggagcagcagtcacggccacaggactctggtgaggccgccgcttggtcagtggagaccgcatgtgagacctcacggcccggccagggcgagtcaggtcagagtggctggtgaggctgtcccagtgctgaatagcagcactgccctggtaagatttacccaagagacttagactcacccacactagaactgatctcttatctgttgagtgcctactgtgtgtcgggtccaatgggtgcaaagacgtatacctggctcttcctgggtctgcgggtctcatgagaaaggcagaaaaatcaaccctatctctacccacgcccaacacaaacacgaaactctgcagatgatagccgttccttagagggagtgtgtaaaaactctgccgctattgtcgcttcctgcacagaaagtgctgaatagtttgtaggccccatctgtgttcttaaggtgttattcatttcccttccctgaaataagctcagctcagcaactgccacaagtcaagggcagaattcaattgtaaatagataatccttcatatcagccaccaagagcagcaggttaggagttgtcaagccaataatttaatgccaattctctggcacgtcaatatttgctaagaaatatcccttcattgtgctgtgtgttacccctgggaatgtgaatctgtctggagtctggcagaaattcaagtgtctttgaaaagacagtcaggaactctgttacggatatcttgttttgacaattccctcttgactgtcggaagattcctgcaaggttccagtcaggctgtggattcggcattacaaacccctccgtttgtcctatttggatactttacctggcaccaattagggacacctggcagggcgacaccagggtattactaccaaagttctacaaaggcagggcagagaggcatcgctgctaccataaggctttgtcaatacaccaaatgcttatctcatttgttaaaaggaaatcatttgaccaacacgcaaaagactatggggtagatctgaattgagccctgcgttccatacatcgaaacaacatattcctggggtggcccagtagccgtgtctgttcaacttaaccctgcctccatacgcacagctgatgcaacagacctcaagtgaggccaacaaggttctcttctccagggattttggattttgaactgagcacaattggggttcagtcacagtaatggtaacactcgaggggtgggccacaaacttagctcgggaggtcccaggccctgcctttgctcagacttgtctttatacttggttggctcaatcatccctcgggttcctgcaaataactcaacatcactcaaataaattacatgttttttgtttctttgttttttggtgttttttgttttttttgttttgttttgtttttttgttttttttgagacagagtcttgctctgtcgccaggctagagtgcagtggcgagatctcggctcactgcagcctccgcctcccaggttcaagcaattctcctgcctcagcctcccgagtagctgggactacaggtgcgtgccaacatgcccggctaatttttgtatttttagtagacacagggtttcaccatgttggccaggatggtcttgatctccagatcttgtgatccacctgcctcccaaagtggtaggatacaggcatgagccaccacgctcggccacaaattacatgttttttaacctaaacgagccaaagtcatctctgcttatttgcaaccaagatcttttagcagagtgatcagcaaaaatcaccagttgtgtctagttaattggaaaaacataaaagtcatattagcatgcttttgctttactactttagtcttgaaaggatagtcccaagatgttgcctctgaggacaccccgtctgggttgcatctccttactctgaaggggctaaagtcccaacagaaatatctgttgactgcactccagcctgggtgacagagtgagatcctgtctctaaaaaataagcaaaaagggacgggtgcgtgcggtggctcacacctgtaatcccagcactttgggaggctgaggagggtggattacctgaggtcgggagttcgagaccagcctgaccaaaatggagaaaccccatcctctactaaaaatacaaaaaaattagccgggcatggtggcacatgcctgtaatcccagctacttgggaggctgaggcaggagatcgcttgaacctgggaggcggaggttgcagtgagccgagatcgcgccattgcactccagcctgggtaacaagaatgaaactccgtctcatatggaattctaatataagtagtatctaatgactagcttttttcacttaatttgtcttaaatgtctttcacagagacctacctttaatctttttagtggctgcagactattttataccttaatttgttcaaaagataccctgttactagactttgaggttatttcaaaatttttgctatgaaaaggaatgctgcagtaaacatctttgaacataaacctttgtgcacgtgtacacgaatttctgtaggatagattcctacatatggaatcctggggcaaagagtatgtgcattttttattttgatagtctcgctaattgtattttctgacggcatttctctctcccaaaccacatactcttcatatgatgtgactttgacattgctctcatcaagaggtaggacctgggtcccctccccttgaacctgataagccctttgtgactacctcaccaacagaatatggcagaagtgacactctgtgactttcgactctgggtcataaagattacacacccttccaccttgctccttcaggatagtcaccatgtgagtagttcaactgctagaaggctgccatgctgcaaggaagcccaattagtccaaatggagagaccacatggaaggaccctgagatcatgagaagacagagaaaagagatgcccagccagccccactgggttccagcttcaccactatactgactatattacaactgcatgaaaatcttcagccagagccaggcagcagagcccttttcaaattcctaacccacagaattgtgaagtgtagcaaaacaattgttttacattgccaaatttggggtgatcttttaccttttttgagacagggtcttactctgtcgcccaggctggagtgcagtggcatggtcacggctcactgtagcctccaccttctgagctcaagtgatccccccacgtcagcctcctgagaagatgggaccacatgtgcatgccaccatacttggataatttttaaattttgtgtagagatgaggtctccctgtgttcccagggctggtctcaaactcctgggctcaagcaatcctccctcctcgacctcccaaagttctgtgattacaggcatgagccactgcacccagcctgattttttaaacacagcaatagataaccagaatgggtaggttctgccaaactgcaaacaacaattctcagtagtaatataagaacaagaaggcaaatccttttctgggcatttctagtgaactagtaatgcttcatgtggttttaaattttcaagtagaaaaagcatttaaaacaatatgcatatatcatagtaacttcggaaagtaaagaagatgagaaaagaaaggccaggtgcagtggctcacgcctgtaatcccagtactttgggaggctgaggtgggaggatctcttgggcccaggagtttgagaccagcctaggctccatagggagacctcatctctacaaaaaaaataagaataaaattacctaggtgtgatggcacacacctgtggtcccaggtactcaggaggctaaggtgggaggatcacttgagttcaggaggtagaggttacagtgagccatgattgtgccactgcactccagcctgggtgagagaacaagacccagtctgaaaagaaaaaaaaaaaaaaaaaaaagctgtcaccttcccaaattccaaacttttctctttcacggtcacatatcctattattttacaagcaatctttgattaatactatagatgtcctaaagagtcaaagtgaatatgagatgggctccagttccagggcaagaggtttctggggcccagattggggcaggagagctcaccctcttgaaacaaagctaacaagaacactctggatggggcacgctagtcgcttagagccttcccactggggatccctcctttcctgggcacactgtgtatgggcccactgggggcctggctcaggcaggtcccgggcaaatgcacattgcccctgccaccacagtgcttctaacaagagccatgcccggcaccattactggcgctaggcacttgctatccactttgtatacattatatacgttacacattgagcagctcaatacacgtttactcaacaaatgaaacagaaggtcctcactcctgacgtggttgggaaagcagaaataacactgatatcctctgtgtcctgcatctctgttgtggcttttgatttaacacatgttgcctgagcacctgccaggcactgttctaggcactggggctgcaacaatgaaccaaacagacaaaaagctctgccctcaccaaactgacgtcctagtgtgtgtttgttgggggcgctggaggggggcttcagtgtgtgaagacagacaaaaacccagatcagtaactaatgtagtggactagaaggcggtaagtgctagaaagaaaatccagctcctcttcccctattgcttatcatacggggtggctgaaaggcacacaccccctttccctcgagtcctagggataccagggagggagtgctgatatggtccataaaccagacatcctagagtgggatttggaaacattgcgggtaagactagggtgccttcctacacgccatcaggaaactgccatccttaaacgttaataagatgtaggcttagaaataacacattacaaaagttggttggaatgaagggtgacgtaatgacaactggaaacacagaggggtgttattatggagtggagaaaaaggagattggagaggaagaagttggcagtgggtgccagcactttccagaacaggggtgccccagccagcgcaccggagcctgcttggtctgtgaggacatggggtcctttctgaagtgagaagcagtgagccacctcctggacagcagctcttcctcagatggcccttctggactattctatgcccagatgagaagtgtgcttctgaaactgatgacgcttgcctgtattagcggccgttttacttcagcgccgtgctggctgagagctgcaaagtgttggccaccagctggtggctgaaatcaagaggaagccaggtcacggtggtggaagtaggatgaaatagtagacacacgatgtcaccaagagtgtagaagaattcaggtaaatgcatttccagtaaggtgggatcactagtgccgcttctggtgctctgggtggagagccactctgtcatcctggaggctactttggcccccaactcatctccacattcctctggcctccaaggtgacatggactatatataaccaagggccacggtggggagggcagaagaaatatgactgtttaagggcagtgggagaaaagaaaaataaggggctgatgagagagcggccagacgtgggccttttgctttcagccaagtcttttcccaagtaaccacaacatttgtcatagttattcagtgtggctctgaagcctgtcccctttgtcggggcagaaaaaatgggctctcctgtgttcaaaaggtcatctctactttcaagtggtcaacattccgcagtctgaagctccctggcccactagcttccagtactgtgtgtcacttcccacgtatgcggcaaaatgacagagtgtgtgaaagggtgaacgcgtgtgtgagttcagggtttccctctttggaagctgtatggcataagagctgaaacaccatgggctgcgagggcagactgcacgtgttcagaccatggcactgtcatttgagtaagggacccaatcctctatgccgaaaagtgggagaataataaccctccactctcagagccatcatggagacaaaaagagagaaaatgctgagtgccaagcatactacccggcttatggtaccttctcaactgagattagctactagtctcacctgctggaaattgttcttgctaccaacgtggcattcctgatctccaatctttggatagaaagcgctatgacccttccccatgtgtgatggccttcagtgctcaatgctgcccatatcccccgtgttgtgtgacaccacagcacgagtgagacctctgagctgaacgcagcagcctcctgccatcgggcgcaactactctcagtacaaccaaacatggctgccaggcttttcttgaaaaccttctctagctcactctacagactctatcatgaaaacagactttgagatttatgcactcaaaaaatcctccaacagcctgtatacctatatgtataaaaatgcttaaattcaccaggcacagtggctcatgcctgtaatcccagcactttgggagccagaggcaggtggatcatctgaggtcaggagttcaagaccagcatggccaacatggtgaaatcccatctctactaaaaatacgaaagaattagctgggcgtggtggtgggtgcctgtaatctcagctgctcaggaggctgaggcaggagaatcacttgaacccgggaggcggaggttgcagtgagctgagatcgtgccattgcactccagcctggggaacaagagtgaaactctgcctaaaaagaaaaaaaaaaaaaaaaaagcttaaattaagagcatttcaatgaaaggccattcagatttgttctcacggaagggatatgcatcttctacccagaccctcccatatgctctcctctctaggccttggaaccctaatttaaggatattgctgcagtgagatgcttaatggcagaactagggcgcaaccaactcagcacactggtcaactgctaacctttcactaggagcaacacgagagcctcagagttgtgagccctgtgggcaccatgaagattggtggagtaagaacaaaaaaaaaaaaaaagagagagagagagacttcaaagttgctctacactggatcgtggaaaaggagcctcttaccaaaagtggcagcggggcttagagtttgatctaggaaatacacaagagcaaaggggcagtcaggctgcagagctctgaccccgagcacatggtatgcaaacaggagtattcacactctgcagtgcaagagcctgtccttcatcttgggggatgaggccgcagtgatgtccccccgattcagtactatccccaaacaattcaccaccctaaagacgtcctcctgtgaacagcagattatctgaggatccctaaaagtggtccttcacatagggaggctgccattttcggagttggctgttagtgtggcagcaaacagctggcattcctaagtaaaaactcagagccagaactggtgctcttcaaccccgactcagctctgagacacagacctgcaggcaatgtgggcagattcaacaatgtcactactgagcctactgaaaacaagtggacaagatcccaagccatcaattctagaacatggttggcgtaaaagctgttgtgcatggat[319 bp omitted]caaaaaaaaaaaaaaaaagaagtatttgaggcccaaggagtcactgtggcagagtggaaagactgggaaatgattgcatctggagcgtcacttctgaggataaggtgattggggtacacgtccttctcctctccctttcccttaagacgctccagcgtaagggcttaaacagaccctcaagacaccgtcctggaaagaggcagattgatggccacagctgagtgtcagaggttacatattagcatgttcaagcctataccagggacgtgtgtatcacatgccatgcaaagaacacaaaatatctgcccttccaatgtctgctgctagtgcaaataataaaaggtgtttgaggataatattaaaatgatgtcatcaccttctgcttatccactcttctggaaaaaagtaagatagacaacccaaaaggtcagatttggctttgcaatattggctggcttatattaaacatggtctgtcagagatttcagaagtcatttcaaagcaacattaaaaagttgaattatgacacattcctaacgaaatgatccagttttcccaccttggcctcccactccgagcatgccacactctctcacacctctgtgccttggcagggatcgttcacactgctttggggccctctgccagcttctctgcacccagcacaccagcactagctttaggcctcagcttgaaaacacccgctcctcagggacacctcctcccccatgcccagggtaatcctaggattgcttttctatgctgcttctgtatactaaacacatgcggtacagaaattaacatgttatttggttaaactaacaattaattggattcatgatttaccttccccgatggcccataaattctttggggttaaataacaggccgtgtgtttccaatgtctgtgtctcctctcgtgcctagcacagagctcacataatacatatgcaacatatatttatgtttttgttgattggatagcagctcatagcttagactcaaatatcttaatacctggaatatgagcagtcagcagtaggaatttcaaaggactttcttttttcttttctttttgagatggagtctcgctctgtcgccaaggctggagtgcagtggcgcgatctcagctcactgcaagcaccgccgtctcctgggttcacgccattctcctccctcagcctcccaagtagctgggactacaggtgcccgccaccacgcccggctaattttttttttttgtattttttagtagagacagggtct[138 bp omitted]gaatattccagcagctagaacagtacttggcacatagtaagtgctcagtaaatatgtgttaaagaaatgaatgaatgagtgaagaaatgaacgaatgaaagcatacaaattatcaatagaataggtaatcaaggagtagtggttttaaagaactgtaaagcattccagtaaagtaagtccagttggtattgctaaattcaaaatcaatatattctccattagtgatatgaatttaaaattctaggagaatatgttctgtatttactttgcaattaaatgaacagagttgcattgtagtgaaatgatgggattttaccagatgctcatgggttcctatcacagatgattttagactcacaatttcagacaactgggcccattttgtattgaatcaaatcgcctcagttcatgtttcattcattccttgtaactttttgtcaccctctattgggagacattctcaagacattaccaaaaatcacctaacgacagaaatgtttgtgtttacagcatggcaactcacagtgtgacgtgggaccaggagcacagatcactgaagagactgttagaaatgcaacttcaggctggacgtagtggctcatgcctgtaatcccaaaactttgggaggccgaagcgggcggatcacttgaggtcatgagtttgagaccagcctggccaacatggtgaaacttcgtctctactaaaaatacaaaaattagctgggcgtgatggcatgtgcctgtaatcccaattactcaggtggctgaaggatgagaatcgcttgaacccaggaagcggacgttgcagtgagccgagatgcgcctttgcactctagcctgg[140 bp omitted]tgaaaccccatctgtactaaaaatacaaaaattagatgggcgtggtagcacgcacctgtagtcccagctactcgggaggctgaggcaggagaatcacttgaactggggaggcagaggttgcagtgagccaagattgtgccactgcactccagcctggctatagagcaagactccatctcaaaaaaaaaaaaaaaaaaaagaaagaaagaaattcaacttcaagggtcctacctagaaacctgttttaacaagcctccatgtgactcctctggtgctgaagaaattcttcacaccatacaataaaatatcatctgttaccatgatagaagaaaccgtggctttctctggcgactataagtacggataatgggccagggctccctagctggaaggaaagtcactgtcctgggggcaaagcaggtacccagtgactgtccctgctgatgatgcaccccgagaagtggagcaggctgggatgtgtttgacacaaagccctcttgctgtcctaatccacacccacgccaatatccctcagcctcatttcctcttgacaaagacggttctgttctgagggggtgtgtgggaccaacagcagcagctggggtggccaaatgaccgctcttgcttagaatagagagggattcaaagaatgatctctgccagattgccgggctttgctgtgtcacatcaggctgacacagatggccttggccactaaggacgctgccttcttcctcacagaagcccgaggaaatgccctgagaaggaacaaggaccagataactacccggcagggagtggctggtaggatttcagcttgaaatgtgatctctggatgcccatgagccagtgtggcatttatttccaccgcatcaggggtcccaaccttggataacatttatatttctagagcacctgaagaacaaagattccagattgtaaggtgcaaaataagtcacaagggggtgccttctcactcacacacagctagccacagctgtctgccatcccagagcgtaccccgaagctagcgcgccagcgagctagttttaaagcacagacaacctctccattgctggctttcttcgaacaccgtgggtgaggaaatgagacagagaatgtctaatgattagttccttatggtccttacattcttgaagtatattctttacgcccgctggaacacttctgcattcttgatagcatgattgcaatataagttctttcccttctgagcactgtcttttattgacacactaaaatatcctaggagcaggatgggtcttcccaccttcctcacgcccctctttccccactgccacactctccgcgccattccttgttctctttctaagaacgcaataaacatttcagcacaatcttttcaatccacattatttataatattccgaacatccatcgagcctggctagaatgcgaagcaataaatcaaacttaacaacaacaaagaaggaagggggaaaaccgccctttggcgaggcgaaagcctgagacgtttcattccccgaagggtttagttatgttaggaaaagtgagatggggatgagacccgaggtttagaatgacatagaggcaggaactggaatctataggcataatcataactttgtataaacctcaaacaaacttacctctctggggtgtcatgaggataaatgagatacgtgggaagcactccgagtgcctcgaacgagagcaactggagcccaattctcctttttgggtccaaaaggtcatctttcttggaagggagagggctaagagctcccccaactccctgagcgccagtctttgctaattaacatcccctctgcaggtttaactaagatgggggtgagcctggaagcagggcctcgaggtagggctgctaggtcctggacccagtctccacccccagcagggacccctctccccactgccagcgaggaccacgccaggccacacacagccaggggtgtccctgcagaatgattcagctcctgccgggggtgggaagtagagctcgtcccacatcctttcctcatggcgctacgcaggttaacactgtctgactttgtcttcgcaaagaaagaatctagctccacagtttgctgatgatttcaaaatttatctaaacgaatgtggaggccagtacaggctattggctaattgcagaattggcttgaggcctttctgccttggcgatttcccacgcattcccgtctcacgttggaaatccaagctgtttgggagtgggcgtgtgtttgcgtggcaggcctcaatgcagcggctctgttgctgtctagtctaacatgctctgccgtctgctctcagtggtcccttctgacagtttcctggatataaaggggtgcttcttttccagtcttgttgaatggtactgaatataagattagaataactgaatcacaatccacattttagtcattacagtctcatgttagctctggggaaatgaccataaccggtacttactcatgagaattttctaccaaaaagtcagacaagaaagtcattttcttatgaaaagtgtcaaatgtgccacctactctggctttgccatccctcccctctgcatgttaacctcacttggtcttcttaaggtacagataatgccttcctgcccagatctgttacctgcttgctggcttgggtggaggttagatctcaaccactgttctggaaaggatttgatcatcagcttggctttgttcataacttcctgcagtaaaaaaaagtcttcaaaaaacccaaattcacgagtgatatagacatttgtttaaacaaagtcttcaggccgggcgcggtggctcccagcactttgggaggctgtaatcccagcactttgggaggctgaggcgggcggatcacaaggtcaggagatcgagaccatcctggctaacacggtgagaccctgtctctactaaaaatacaaaaaattaaccgggcgtgttggtgggcacctgtagtcccagctacttgggaggctaaggcaggagaatggtgtgaaccccggaggcagagcttgcagtgagccgagattgcaccactgcactccagcctgggcaacagtgtgagactctgtctcaaaaataataataataataataataataataataataataaacaaagtcttcaaaaatacaacaatttcttttttcttttttttttttttttttgagacggagtctcgctctgtcaccaggctggagtgcagtggcgtgatctcagctcactgcaacctccacctcccaggttcaagcaattctcctgcttcagcctcccaagtagctgggactacaggcatgcaccaccatgcctggctaatttttgtatttttagtagagatggggtttcaccatgttggccaagctggtctcagactcctgacctcaagtaatccgcccgccttggcctcccaaagtgcagggattacaggcatgagccaccgcgcctggcccaacaatttctttatgatgtctctaagtcacagaaaccaacaaaatcatcattacttgactgttcaagttaagggtctctttacaacttccacttcttttgcttctgatgacgcaaccatcctcttgagctccggcctcccagggctgagtggttcacccagacctctggggtcccttccttggtatatttccactttcactccaagcgtccatgggaacttctttcctttgtctattacctcctaggtggagctcttctgccttcctattttcccccatcgcctctaagtaaagggctggcttcactgacgcagggagacatcgctgctctctgtctctcctttagtgccttctccctggtcaatggagttccactattcccacccttacctatttacatacaccagcaacttctctttacttagaggtgtaagtctgctggagagcagactgtctagctactgaacttcccatctgtgtgatcatgagccagccatttaacccatctggacctcacctataagatggggataacaggttgggcgcagtggctcatgcctgtgatcccagcactttgagaggccaaggtgggtggatcatgaggtcaagagtttgagatcagcctgaccaacatggagaaaccccgtctctagtaaaaatacaaaaattagccgggcatggtggctcatgcctgtaatcccagctactcgggaggctgaggcaggagaatcatttgaacccgggaagcagaggatgtagtgagccaagatcgtgccactgcactccagcctggtcaacagagtgagactctgcctcaaaaaaagaaaaaaaagaaaaaaaaaaagggcgggggataacagtagcgtatatataatgtgctgcaataatgtcaatgacacagtaaatgctcaataaacactcacttatcttattattaaggcttttccagtcatgcttcatggtgtgcctacagccccttcaaatgggatctttttagatcagagctctggctgaggtgtgagtcaaggtggctgcggtttctatctaccccctgatcccacccatcaagccatagggccctgggcatgcagggcaagttcagccgatccacaggctggccagcagcccctgagtgattttggtccagtacatgcaactgagctggataaggattattttctctgaagttggactaggaaataaggagtgatgcaggcttaccaagtctgccttggttcctaacgaagggaacatgtttctttaaagtaaccccatctttttttgtggaaatgtgagtgattctgtttcattttttccccaaccaaaagatgtcccaaagaacaaaagtttaattaatatatatcccaggctacagatgtatgtgctttaaacgagggacagattttgactcaaggaatacatttctaattgtaaaattttgggtcatcagcaagatgactgaaaggatctccatcacttccgaaattagaacttttaggccactgttgagatatctaagacatcaacaaaattagttttttgtcagcttttcttgtttttgtttgtttatttgtttgttttttttttttggttgttgtttttgagatggagtctcgctctgttacccaggctggagtgcagtggcacgatctcagctcactgcaacctctacctcctggattcaagccattctcctgcctcagcctcctgagtagctgggattacaggtgcccaccaccacgctcggctaatttttttgtgtttttagtagagacggg[135 bp omitted]ttgctatgttgcccaggctggagtgcagtggctattcacaagtgtgatcattaacacacgacaaccttgaactcttgggctcaaacgatcctcctgcctcagcctctggagtagctgggactacaggtgcataccactgtgcctagccagaatcaccttttaacatccatggctatttcaaatctagagtttacagcgtcagtaggtttaatgcggatgaacatcttcatgacttaaaaatgagtaaggaacacatccttttctggttaacttccttgtcactctggagaatgtccctaccgctatttctcaaatgagaggacctgaagttctctggagcacggggtgtggatggaggtataagagaagggatagctggaaatgatagtgggtgaaggttagtgagggcagggtctcaatgagtgagggcagggtctcaatgagtgaaggcagggtctcaatggctcatgaaggcatctaggctgaatacacagaagccagtcagcctccatctgcttctacccaactctgtaccaggtaccatgttaggttctgggaatacaacaagggtcaagatagacatgatacctgtgcctgaggaattgacaggctaatgggggagtcagacattcaaacaaccacacaataaaatgattacaaatcatagagaagcattaagaaggaaataaacaagatgttatgacaacagttactttaatggggtggtcagatatggctttctgatgaggtgatctgttgagatctaaaagtaaataaagctgggtgaagaccatgccagccaaagccaggcagagtgggaagcacagagcagctagggattcatggaatggaaagaaacccactgtggttagaactggccagtgaggagagaaatcaaggtaaatttggtgagagtgtcagggctaagtcctgcagggccctagaagccatggtaaggagttggattttatcctaagtacaagggaagcaagtgaagggtttaagcagggagcggcaatatctcctttaggttagacagtcatttatgtcacagtgtggagactggaccggagggtatggtgtccaggtccaagtaaagccaacaagacctctttgagagaactatcccagcatctgggtaagagggtgacatgaaatggggtggtggc[135 bp omitted]gaaaaccccgtctctactaaaaatacaaaattagccgggcacggcagcacatgcctgttaatcccagctactcgggaggctgagacaggagaatcgcttgaacccgggaggcggaggttgcgatgagctgagatcacgccatttcactcctgcctgggcaacaagagtgaaattccatctcagaaaaaaaaaaaaaatagaaacatactttagaatgccacagcttctttttggataagcaagggcggctatagtgagaggagaggaggaaacaaaatttctaccttgaataactgggtcaatggcatgctatttattgagacagaaaactaggggtaggtggcgttctggatatgctgcagagggatttaagctgacatatcaaaaagttcttggatatgcagtataatggagctcagaagagagatcttgggcagtggcagtgatggtgacaggttgagagcccaaagaagagaggagagaggaaagatcacggggaggcggagagcaggggagggagatcgggcagggtgggtgcagggggtaccgtgagtatgggagcttctaagacttgggcccagagctgctaaaggggcactggaagggaggactctggctctgtcactatctgatgaggacagcagcagagtgactacagcaagcatttacagagagtctattgcacatcaagcactgtactcttgatcttccatacccctctctaatccccatcatcacactgtaaactggtgttactattattgtcattattattctgtgtgtgtgttttttgttttttgttttttttttttgagatggggtttcactcttgttgcccaggctggagttcagtggcacaatctcggctcattgcaacctcccgggttcaagcaattttcctgcctcagcctcccaagtatttgggattacaggcacccgccaccacgcctggctaattttgtatttttagtagagacagggtttcaccatgttggccaggctggtctcgaactcctgacctcaggtgatccacccacctcgaattccttacctcaggtgatccacccaccttagcctcccagtgttgggattataggcgtgagccactacagctggccatcatcattattattaatgaacctgacgctcagaagcattaagcaatttacctaaggtttcagagcttttcagtgttgggcctgggatttgaacccagctttgactaagtttatcatcagagttgactaactcgaacatatagtcataacaataaagttaaggttgtacagaagtagaaaaagacctaagataccagtaacacagcttccaaaccatcttctctgctttcacagccaggtgcccagctctagactagactatgatggacttctcactgtcttccctgctacagaacatccccagaagcaacaggtctccctcatgctgccaacaacaaccctcttcttcactgtgacaagcctgaccccatctgttttttggttttcctcttcaagaactgcaggagacaaaattattatttgcagataatgagaacacctaacgtggaaataacaaaataatccacagaaaacccttttgaactaaagaaaaaaggatagcttaaaatacatcaatagattccaactcctttctcataaggcagttaaaatcaatcagaaaatataacagggtgtgatggcttacatctgtaatcccagcacttcggtggatcacttgagcccaggcatttgagaccagcctgggcaacacagtgaaacctcatttctataaaaaatacaaaaatcagccaggcgtggtggtgcacgcctctagtcccagctactgcgaggcaggggtgggagaattgctcgagcctggctggtcaaggcagcagtgagctgagatcatgccactgcactccagcgtaggagacacagtgagtaagatcctatctcaaaaaaaagaaaaaaagaaaatcaatgaaaaaagtgtattaataactgatgaacggccgggcacagtggctcacgcctgtaatcccagatctttgggagaccaaggcgggtggatcacttaaagtcaggagaccagcctgactgacatcgtcaaaccccgttgctattaaaactacaaaattagccgggtgtggtggcgggcgcctgtaatcccagctacttgggaggctgagacaggagaattacttgaacctgggaggctgaggttgcagtgagccaagatcgcaccattgcgctccagctggggaaacaagagcaaaactccatctcaaaaaagaaacaaaattttaaaaactaatgaacagagaacaaaggaatgaacaaaaatggacagaacgactttttgaaaattccacaagtttactgaggaaccgtaaaagaaaatatgaacaaagacagatccataccatatttctggatgggaagactcagagctgtgtgcctgtcagttctctccatgttaatataaacatttaactcaaatagcaacaggatctttcaggaacctgccaaattactgtgaggcaactaggactattctcaatctgcaggcaaggaaactaaggcttagacaggttaagaaagcacaatctgtcgtaaggaaattgatgtggaggcacagtagggcacacctcagtaacaattacaaagatgttggatgcagagttgtgtgtctatgtgtgtgggccacagataagcaggagagtggattgcacagggccctaggtgtgacaaggaatctgggcaatagagaggctctgagaggtttcagcgggaagaagtaatggtggagggggagggttcacagacgcaaatctgcattttccaaagctcctcctgacttcaacgtggagaatggactagagggggcagaactggaacaggaaggcgatgcaggaagtgacaggagtgatccagaagatgacagaggctgaagtcaaggtgaggctgtgggaaggaaaagcagtgttgtggatttcatagacactcaggaggtggaattggtgaaaactggcatcggacgagatgtaggggctgagcagaagcagggatgattcctgggtatttggcctgagaaatggagtggttggtggtcttgctcattgagatagaaaacagaagaaaagcagggctggagaagatcgtgagcctagttctagaaatcttggaattgctgcgagcaagttttgacagcacgatatttggttttcttccactgggattacagagaacttgtcttttgggtagtgagccacaggggaaattttcctgtttgggtggggggctgggtgcagacccacctctactgtgagtatcctaactgtgaag[142 bp omitted]gaaaccccatctctattaaaaatacaaaaatcagccaggtgtggtggcacacacctgtagtcccagctactcgggaggctgaggcaggagaatcgcttgaacctgggaagtggaggttgcagtgagctgagattgcaccactgcactccagcttgagctacagagtgagactccatctaagagctcaggtatgggtctagcatcgacagctgctggaggcctctccaccagggccctcctggggccttctccccactctcctgttggaggcctcatcagatgccacttctccatttcccccctctatctgagatttccagatggacattttatgtttttgtacatttgataaatttttgtttggtactgatgacatgttttgttttgttttgttttgagatggagtctggctctgtcacccaggctggagtgcagtggcgtgatcttggcttactgcaattttggcttcccgggttcacgccattctcctgcctcagccccccgaggagctgggactacaggcacctgccatcatgcccagctaattttttgtatttttagtagagacagggtttcaccgtg[136 bp omitted]ggtagagtacatttcttcattcattattccttccaacattacattatttgaaagtatggtaagacagggttcaacagaaaggcacgcagttggtgcaactggaagctatcctctttatgaatgaaacgttagtgtctccaggtgtccgttttcttcgcttaaaactgctggcatcatcttataactcagacttagctattcatcacggtggaaagaaaaagtcagccaatggaacataagccttcttccctacgagacactcctctggccaacctatatggccacaaagggcagaattgagattctcctgctcacctggtggccgcatgcataaccagcctaaagaaaatttctgagagaaaatatccaggcaagagctaacttgcaaatctgaatacttgaaatgagacagtcactttatggagatgaatcttttttttttttctttctttaccaaaactgaagaactgcacatgtatgtcctctaacaagtagacatctaaagacaccagcataggttgggtagaaagtcaagaagcaagagagtttacgtatttgctgtagaacctagatagggattccaggggacaagagagcccaggacacctgacaggtattcttgataggaaaaacagagcactcacaattacagatgttgtgaccctggtccaaataatatctttactctgacaaaaagctgtggacaattagaaattacttttcttaaactaaagggttttttcctttctataaatattcaaccttctgtgtttgaaatagaattctcaggcaaggagaggtggctcgcacctgtaattccagcactttaggaggctgaggtgggcggatcacaaggttaggagttcgagaccagcctggtcaacatggtgaaaccccgtctctactaaaactacaaaaattagccgggtgtggtggtgcgcgcctgtaatcccagttactcaggaggctgaggcaggagaatcactgaacctgggaggcagaggttgcagtgagccaagaccatgccattgcactccagcctgggtgacagagcgagactccatctcaaacaaacaaacaaataaaagaaatagaattctcagtgttttcatgtcactggggttaaagtataaactcaagaaaagtaccatgagaacttggaatgtggagctttcgcaatggatagaacgacattcttttcatttaataaggttgaactgtatgcatctttcaaaattaaaagcaatgttttcaataactgcatgtttccaacaaccttggtctctatggattaaattctatttcttttcatttctggaattattttattaatcaaacacaaaattattatagtctactcagaaaagtctgatggaaattgtaacctgaatcatattcgaggattttcttttgaagcagaaagccagcaattacagtactggaaaaggctgttttactgtggtgtatttcctcgggagaggaaatgatttttgagaatactgaagccttttttattctaaagtaggctagcaacacctgtacacaatctttctagacaacaataagacttttctgaggtttcatgtcatgatcgtttaatttaatagctctgagagtttaaacaggacactcatacctcagttaactggcatggtcagtgaactggggattccagttaacttaatttttccatcaactaatagtaacccatttatgcaatgaaatttcctcagcaggatacaggggatctgcacagctcttttcagatatgtacaattgtatggtttgtctctaagttttccttttttaaaaaatcagcatcttgccttgtgtaaatcttcaaattaataaaccaatgatcaactacaagacggctcaccaaaacaaataagcaaaaaaggttaggtttaactctgatcgtcttagctaaagaaaataaactacggagaaaataaaatattttcttctcaattcatacagcattcacttaaggcaatggtctgcaccctggagatacggagataaacaatacatgtttttttggacctcagaagctcacagtttacatatggataaagtaggaaagttcagaagatatgagcaatgacagttgtttaaaaaattttttttctttaaaagtgtataaagctactcttgtttttgaaaagtcaaggcaaatgaaacatactttttgaaataatcagggaaaaaaataagtttaaagtttcctctagatcttttaatcagcagaataataaggactgactttatatctagacttcgacttagcagaattagaaaacttcaaaagtcctagaaatatcacaggtaaatgggtaaaattaacctcaaaaagtttctgacttgactttctaggggccgaaacacgcaagatccttctcagttctctcccttagtcttatgttttaattaacagaggcaaagtttttcaaagtcatgggtggggcttgctttatttcctctgatggtttccagcagggaaccttggccttaggatcttaagttttctggaatactaggttccattctcccagcttcccaggccccacccccctggagattctgattcagcggttccgggagagggcccaggaatttgtatttttagtaagagcatcgtgtgattcttatcatcagggaaatctggacactatggataataacaatttgcccacgaatcacaggttgtgggtagggcttagagagaaaaacagattcccaggccccaaggctcagggaatcagcttcaggaagcctgggctcagactcaggaatctgcatttctaacaaacacctcaggcaacatctggtggacggaaacactgtctttggtgctgagccaccaaactctattctgcaggtgttggatataaaacaaccagaatcagcagaaaccagtgtagaggtccaaagtagtgataaaaaaaaaaaaaaaaaaggagaaacatctgggacatctccgtctacctgaggccctggactgctgggtgtcttcaataccacatttcctggtctgacctagatgggccttttctctaaggccggcctccagaagccagggtgaagcccagaacattacacacaatgagatgcccatctgttcctgcatggggcagatcgagggtgcctatttatccaagcctggtagtcccaaacagtgatcaccctggttaaataaatacaaaaaggcaaaacatcttttggaattgttacatgctggttatatcatgcctgaaaattgcaaatgaaactagtacatgtaccaatgcctggtcataaatgaacacattgtttactacaaattctgctgaaataaacctgtcttcacatacagttgctaaggcacttgtgcttagaaaaacaaatactttaaagacaaacaataccttcacattttcccttcaaaagtgactaatttactcaatacttctgaaaaattgtaacgaacttcttctggaatccccatattaccgcatcccacacttgccaataactatatggagcgctttggaaacgccgagggaaatagcagacttggtaaggcttaaaaaaaaaaataaggcaagatcatagatgggatgaaaaactcaacttgaatgcttccccgtgaagtcagtctacgtttgatccaaatggttgaactccaaaagcacctcagcagttcagctctcttgatttcaaacccctgcccacatggctcaaatttgcaacttaaatattcggtatgaaaacgaaagttatttaactgttagcacaggctctcttctccaaaagagagtaggaagggcatacgtttcggcccacacacatacgccgatctttgacttctaaatatcagggcacaacacacacaattattttggctttgggagacaacactgtctgttatgttggggtgggtagttacaaaaaaatattgtcttgaacactgccagagctgacgattttatgcatgtgtagtacaaacggttctttttcattttggaaagaaaaagcacttaaaaaaggtttggtagggaggctctgcagcgatatttcacctcaatacatctttcaagtttgatagcttgtaagctcacggctttggttcttgtcttcaaccttcagacaactctaagctggctacagcagctgcagaggctgagtctttaaatgaaataaagaaataattgcttcagggaacaaagggaagcaaaaaaaaaaaaaaaaaagtcctgttagctgaactatgtggccccttgggacggtgtgtggtgtgtattcctgatgaatattgttcggtgtggtaaaggaatccctgcaaaaccccagagactcagaaaaagggtggcgtggtagtagaaacagtgggcttcagaggtgtacctgggttcgagctgaggctatgccactgaccagctacgtgaccttgagcactggccctcacctctcagggtctttgcctcttgtctgtgatatgggaatgacattacctgtctcacggggctgtaaatgaggcctggaaggatgatgtatgtcatgtgttgatttcacgtgggcaaactgaatgcccttggttatctctccccgctccccaaactctactagtggggaatggtataaatatataaaccaaaagaacaggagagaaaatgacatcccatcagatacagcaacaaaatgtcaggagatggaaagcagatggataagtcatcagtgtcttacagtagatgacgatgaaacctaaacagcagatttggggtggggcaggctccatcaggttctcctgcaggtgaggctaaaaacagggggactagttaaagactatatgagggccagatgcaccccaggtccctgccaccaccgcacacaatcaggcaaactacctctcccctatcttctcaggagagatgttcacaggtgaaactggactggggagcttgaaacatgggggcaacaggcacagaagaagaaagggatatgacgagatgctggaaatagggagatgaaatcctggttttcatagggcatgagaagctggctgtcccctcttcctgtttggctcccagacaattaacagccaagtttccactcattaggggggactacagggctcctctcagcagtgatggactaaacaaagacaaaagaaatgcagatagtcctgtttgggatccccaatcaatgactaggtcctcccctgcctgataatgcttctgtgaaatctgcaattcaacagatcccacccatgcctatagaactttcatatgtctttttacattcttttttttttgttttgagatggaggctcactcggtcgccagactggagtgaagtggcacatctcggctcactgcaacctctgccttctgggttcaagtgactgtcctgcctcagcctcccaagtagctgggattacaggtgagcaccaccacgcccagctaatttggtatttttggtagagacagggtttcaccatgttggccaggatggtttcaatctcttgaccttgtgatccacccgcctcggcttcccaaagtgctgggattacaggtgtgagccaccatgcctggcctacattctttaacattaatgggtagccaagcatcactagacatttgacaaggggggggggggggagaaaagcaaaacaaacaaacaaacaaacaaaaaaaaaaaaaaccaaaaacaaaaaaccaaccttccccctgaaaaaaaaaaaaacagaaaaaggaatccaatgacaagatacaacgcaaagaacagaagaaaatgtgaaagaaacaataattacaattatcatagagataaaatatgtaatatctatgaaattagaacagaataaattaaaaaatcagaaagcct[143 bp omitted]gaaaccccgtctctactaaaatgacaaaaaaattagccgggcgtggtggcaggcgcctgtagtcccagctactcgggaggctgaggcaggagaatgccgtgaacccgggaggtggagcttgcagtgagccgagatcgcgccactgcactccagcctgggtgacagagtgagactccgtctcgaaataaataaataaaataaataaataaataaataaataaataaaagaatttcaatggaagaattttaagactcacttgaagaaatgaacaaaacaaccaaaaaatgaaagacagaagagaaaataaggaaattcaaggattaaactatgaaacccaatatccaattaaggggtgcagcagaaggaaagaaaagagaaaacacaggaggtaatcatgaaagctataagaaaatgttttgagaactgaaggacatgaattttcaaactgaagcgttcacaaaatacccaacacaataacgggggtaagcggggaagttatgctaaggccttctgtgtgaaatttaggatgctgggactaaagagatgctcctaagagcaaaataggatgtacaacaaggttctggaatcagacaggcactggacttctctatggcaataccggaagctagtagtcaaggcaagatgcctccaaaatttggagtgcaaattgtttccggcctaaaattttatatgcagtcaatcaatcaacaacaagggagataataaagatagttttggacaagtactatctcaagaaaatttatttcccaagtactctttcttagaaagctaggggaggcttaagggggtaaatcaagcaagaaaatgagttccaggaatgaagggctccaaaagaagaaagagttgatggaaagtctcaagaagatattaagaaggcctagcagaggagtgctgtcctagacagctaccagtttggactggtttagaaggacgaggactccaggagagctgaccccaaggaaaatataaaaaagacagattatttgatgtgcatctgacgatacccacaaattttttttttttttagtttggtagtaatttagggcaagaattataatagacaaaggggaaaatccatcctggctaacatggtgaaaccccatctctactaaaaaaaaaaacaaaaaatcagctgggtgtggtggcgggcgcctgtagtcccagctactcgggaggctgaggcaggagaatggcatgaacccgggaggtggagcttgcagtgagtcgggatcgcgccactgcagtccagcctgggtgacagagcaagactccgtctcaaaaaaacaaaaacaaaacaaaacacacaaagggaaaaatgacaataagttccaaaaaaacacaaaatattgcatgagaaaggagatctaattacaataaactacgtagctctgttaatgatattgatatggtcaaaatgaaaacaatgagtgataactaacaattgtagtttaactctgttggtagcacagagaaagaagtgtgagtgcctgagcatgtgtgtgggcggacaatgaaagaactaatcatttcccacaggaggaagttaagagacagcttctagaattgcaagcaaatcgagtcatgtcagtacaagtacattatttagaaataagaaagcaaaaccaagaagagagtgtgaaagagttgaaagtaccttcctttggagagtggggtgtaggggaaggaaggtgaaacaggtgactcttgctttctgttttctcttttgaaatacaccctgcactatttgtctttttaaattatgccattattttgactcatcaccaggtgaaagtctatgtcaaatgcatgccactgtgtgtggattgagggcaggtgtagggcaggatgggggtgagtgccacctgcatctgaacgccatggaacacgcaggtattgggtgttagagacagaagagaacacacattcattacactctcctcttggctgctcagcaagcacgtgtgcgcgtatacgcacaaacacacacacaggtatatacaatttcaagcaaatttgatacatttatcaaaatataattatcccaagcacaaccaaaactgcattcacttccttcccaacgggagaaaaatctcaaatcacatcttgctacagtatagcgagggaaggaggggcctctgtggtacaagtcccagatctctggttaatggtcatcttctcaacccagttcataaatagttctccatattatgaccaagtaatttagttatttccaatatatccgatatatacctgtagacaaatgccctgaggatgctaccaaaagctcctgtttggaaaaggggaaaggcacacattgccacccagtccaggacgtacatgcttcttattagggtgcagtaaccctgtcccctgggaggctcattcttgtctaatgtcctctgctgaaaaagacaaccctttgggggtttccgcactacctaaggtcagcttcaaaaagggaatgttgcatagccatggtgaacatggaacaagttctaggaagaaatgaggatccagaagtagaatcaacccgaacaaatattactgtcaaccaaatagagtttgtgtgtgttgtataaaatcactgtagaattatatgcttcaattactgagattaaatattcagtatcaggaaaaagcttgcctttcttaaaaagtatgttttggctgggcgcagtggctcacacctcccagcactttgggaggccgaagccgaaaagtcacccgagccgaggagttcacgactaacctgggcaacatggtgaaacctcgtgtccactaaaaacacaaaacattagctgggtgtggtggtgggtacctgtagtcccagctactcaggagggagggaggatcacctaagcctgggaatttgaagctgcagtgagccatgatcacgccactgcactccagcatgggcgatgggagtgagactcggtctcaaaaaaaaaaaaaaaaaaagtatgtttctttcctttcctattaaatacttccattgtggtacacatcatatttccctttctgtgttggttttccaagattctatcctcagtgctaaatttaatgctcaaatatggtattagtttaggaattggacatattttatttacgttctcttctacatgtaaacattttctattctttaacagctttgagattttatatatacatacatcttttattgtaaactacccatgtcctctttggaatacataggtcacaaattataaataaaatctatcttgggataggatttgagctatctttgctaaactgccctacaagattcctagagattgaggttggggaagaaactgggctttgaacagtccaaaggctccgctagccagtctttattgcttgctgttttatcttaagtctggttctgcaggctaaactctgtgaacgtattcatttatttatgcttttgtgtatattttggtgttgtttccaaggaaaagttctctttcaaatcctcccgccttgccttagttgaactaaggagaagtgggattttctcctgtgttgatgtgttcctgagtgttggatggggtgctgccagctaaccagaccaggactagagctaaggaagaagctgctggagctggggcagaggcactgggaatccaggaggtacaggactggcccagaggtggatggacggagtccctgcccacagggcaattcctttacacaaagaagaacctcagacaaataaatgggtactaaacatatgaacgatataagggtagagcaaaggcatcctggaagtcagtgtcacggtctccaccgtggggcctgtccgtggggcttcagcattcactggcgtgggagacctgcagcttaggtgtgtcaccaccgtgtggtggaagggagagtgacaggcatacagagcccagtgggttcccagttcagagatttatggtgcttttctaagccacagcttgaacaaaaatagaatctgtttattaaacttgtctctttcataacacaacacagacttcagaaagataactttacagcagacaaaataaagaggaggcactcatatttctccagctacctgctaatggctaatctcgagcatgctttattctgaggcctacaggaaggagtttcctcctctcacctccaactaaaaagaatcccctttctttactttggcattgaaccccttcagcagcacagctcacagtcctggccctggcttactagggcttgcagaatcatcttgcttcaccaagctggtttggaagcagcagaatttcctcttgagccaacaagtcttcccctcgctgaatgctctctggctgtttctaagaatgtgctctgcagttcccatgccccaagtcctcagatgccactagctattcagctctcatgccccccatcttctctccaaacacaaggccttacacccaaccagcaagcaactctaggaagattattttcaagacagattaaagtaacctgacagaaaatagaacaaaacatgaatatccggtatcatcatggatactggttggttaagcaaatttaaattcatttcaccaatattattgaattgggtacaatcactaaataaccactgggacacagcagccagggacctccatgtctcctaggtagataaagaaaaataataatgaatagtgagagcatttacaaagtgccaagcattgttctgaagaatacacatgctataattcatttcaccctcacaaatctcccaatgttgggtagatcccatgaatacttctagtttctaggcagtattctaggagtatctaagggatgctcgaggtctcacagctggtaaccaatggagctggattccaatccagaaagtcagattgtagacccctcaaaacagtgtctgcagccactgccttacacggcttcctggggaagtcatcccctacctgtaatcagcttatgaggacctcacagaagatgtggaattttagagactttttttttttttaatgagaacattataacttgggcatgaggtagctatgaagaattctcaaagacctgattaaggtccttggataagtgatgacagtgagataggaggtgtaagaaggtccggcggtctacccagaaaatgttaccataaaaatagaatactgtcattaattttgaagtgaatacgacactttgtactttgcaaagaaccgtgacatatatgttatccattttaagctttgcagtaaccccagatgtcatgtttaactttttatgtggtcaccatttatagtacttttttttttttttgagatggagtctctgtctgtcgcccaggctggagtgcagcggcacgatcttggctcactgcaagctccgcctcccgggttcacgccattctgctgtctcag[223 bp omitted]tgaagattccacggctagcctagaggtggcctagggtttgggtcttctgatgtctattgcagtgctgttggtcacatcttgctaatttggccccagggtcagcaaagaactcttagtgagagagatggcgtaacacaagataggaaggaaaggaaagatatgaagtctggctggaaggcctaatggtgataaagtgaaagaggaagagaactcgtattttctgagcccttactatgtgcaaaaccctatggtgggcctcaatggctcaggaaagctggaaatacaacagaatcactgaaagagaagattcctgcatggaaggcaactgttgcttctccatcaggatcagctctgagtgagggtggaacatctgaagccaggcgtttcataaacaggagctttggcagtcttacactctttagagcagacaacaaggagcagacaggaatcaggaatcgctccttagagacttccagggatgggaagaatgcatgggaaaggattcttaagaaggtgtgtgcagaggagggtacttcattgatgaaacataaggaagaactaggggccagggaaactctagtgttggtaagcattatggactgaatcgtatcaccccaacattcatatgttgaagcccaaatcctcaatgtaactgtatttggagacaggaactttgaaaatgtaatgaaaatgaaaatgaggtcataagagtggggtactagtccaataggactgatgtcattataagaagaggaagagacaccagagggctctttccttctctgaacttgcatactctgagcatgcacagaggaaaggccacgtgagcacagagcaagaaggcagccatctgcaacccaaggacagaagcctcagcagaaaccgaccctgctggcaccctgatcttggatttctaatctccagaattctgagagaataaacttctgttggctaagcaaccccgcctggtattttgttatggcagcttgagcagactaatggagtgagccttgttggccctgccacctccctggctcttggccaacactaatttatatttgaaaactcagagtcacctcttctatgaggtctttctcattcatcctagccatttcttccttgatgcctcctctctatgtgaagggatcttatcttagaacccataacactttattgacttagtcttttttaaaacaagcctaactgttcctattagactccgagccccttgaaagaagagaccaccttagtcaactttatagtcctggtccctagcatgtagcagacattcaataattgtttatagacaaattaaagaaatgaacaaatctaggatattatcttgaaaatgtaggctgggaccaggcacggtggctcacaccagtaatcccagcactttcgggagctgaggcgggcaaatcacgaggtcaggagttcgagaccagcctggccaacaggtgaaatcccgtctctactaaaaatacaaaaaattagctgggcgtggtggcaggtgcctgtaattccagttactcgggaggctgaggcaggagaatcacttgaaaccaggaggcagaggttgcagtgagccaagatcgcgccaccgcactccagcgtgacgacagaatgagattccgtcccccctcccccccaaaaaaaggaggctgggtgcagtggctcatgcctgtaatcccagcactttgggaggccaagacaggtggatcacctgaggtcaggagttcgagaccagcctggccaacatggtgaaaccccatctctaccaaaaatacaaaaaattagccaggtgtggccaggcgcagtggctcatgcctgtaatcccagcactttgggaggccaaggcgggcggatcacgaggtcaggagattgagaccatcctggctaacacggtgaaaccctgcctctgctaaaaatacaaaaaattagccgggggcggtggcgggtgcctgtagtcccagctactcaggaggctgaggcaggagaatggcgcgaacccgggaggcggagattgcagtgagccgagatcgtgctactgtactccagcctgggagacagagtgagactccgtctcaaaaaaattagccaggcatggtggtgcatgcctgtaatcccagctactcgggaggctgaggcaggagaatggcgcgaacctgggaggcagagcttgcagtgagctgagatcgcaccactgcactccagcctgggcgacagagactctgtctcaaaaaaattagccaggcgtggtggtgcgtgcctgtaatcccagctacttgggaggctgtggcaggagaatagcttgaacctgggaggtggaggttgcagtgaaccaagatcacaccactgcattccagcctaggcaacgagagtgaaactccatctctcaaaaaaaaaaaaaaatgtatattagtgtaaatgtaaatgttatgacatgattaattaatgaattcattcattcaacaataaacttgtaaatggctggaaggaaaaaaagaagtaaattgttgaaagactaaaaaaaaaaaaaaacaaaccaagggcatttctagatagcgaagacatgacaaaatgaaggattagctggattagctgtgtaagtgaatataaagcagttatttgtagtaaccgcttgccatgcagtatgattttaattatacttaaatgtaaaggatagctgtacagagtaggggctgtgtgagctccaaggtgagacaaaggtggtggctgaatcctgcctctgctaatactagttgggtgattttagacaagttactaaacttctctgggcctcatctcattatttttttcaacataaatcttactcaagtataatacatatacagaaaattacataagctgtcaagagacaagctcaatgaatttactagttgccttatcttgtaaatgggaagaataacagcatctgttcatacaggacaggtatgaggacttcatgacatgatgctttggaagcatttggcatggtgtccaatgcacagtgaacctccaaaaacgtcagctctcatttatgtttacctcattaaactgcaatcttaacttgatgtagagatgttcaaaccttgtatcattttgcatacagtctgatagcatatgcccagagtttgcaaaaaaaaaaaaaaaagaaaaaaaaagaaaaagtgaatcctgctcctaatgtggtttagtgagtatagaaactcatctttagaactgagtatgagaatctcatcactgtcacccttcctgccactcccacttaatggaatgattcttcatctacttaaaatgccaaggaagcttagagtcagggccagaggtggcaacaaaatggatgtggagatgcttccttggttggtacatgaaagagagaaagacatcttttatttcagcattcgtgacttctcatacaagctgaatagaggtcatcattccagggctaggcaacagcaagtactcaataaatgtttgttagccggatgcagtagctcacgcctatggttcccattacctgggaggctgaagcaggaggactgcttgagcccaagagttcaaaaccaccctgggcaacacggcaagaccctatctctaaagaaataaaaataacagtaaaattagccaggcatggtggcacacacctgtagtcccagctgcctgggaggttgaggcaggagaatcacttgagcccaggaggtcaagactagcctaggtgatatagtgagtgtctgtctctcaataaatgaatgtttgttagctggggatgcagcaggagcatcttctgaaagaagggcaagttgggaccccactgtatcttaagcggtgttcctataaacaaagttattccatgtacctagcaagggtggaccaagtggttacctaaatagagatgacctgatgggtaaaaagaagtcctttcttttcccaagtgtcttccccaaacagcttcaggatacccaaaattccactgctggtagattcctgtttgtcacagtcagcctcctcctccgttcccatttaaaatggaaatgtcactggctgggaaagcacactctgtttctgacgtgggagcatggatgaactgatgggagtcctttcctcttgagcagaagaagatggacagtaaaagtgtcagtgactgaaggaagcatggatgtgagcacatgtggagcgtgagttggcggaggtggaactttctgacctctgtactttggccagcccagccctggcacccacaggcacaggagagttcctggcaatggaaaggctgatgaggaaatcagctcaggttttcctaagtgctcttccaacatcttccttccactgccacgtgcactcctgctttgtctttccctcttccaagtaactctctgtgagcaaatgtacttctgttattccactttaaaaaccaaaaaaaccgggccagccatggtggctcacgcctgtaatcccagtactttgggaggcca[134 bp omitted]gaggcagaagaattgcttgaaaccagaaggcggaggttgcagtgagccgagatcacgccactgcactccagtctaggcaacaagagcgaaactctgtctcaaaaacaaacaaaacaaaacaaaacaaaaccaaaccaaacctgagtagcatctgtccttgcaagcattcctttgcaactcctcagaagatccaggctcttctaagtagcagcagcagatgtggcttaaaacaagatgcttgaggggaatttacagtctgtgaccaattagccagatgcactcaccttcccacctggtttttctcttgtcggtgttttgcgagccctctctcactttccttgattctctgttggtagaaggtcatttccctttggcctaggagtttgcagtctgaggccatcttgggttcacatctgcttctggacttcagatggcactggtgaccaacacaagccttctccaacacacactcacgcaggcacagtgaccttttctcccggatgcatagctcatcatagttttccacattttttttgtgaattccaacttcagatggtgcaaatgtggtcacatggttaattcccaatctatgctatacagaatgctgagccttactgtgtctgcatgtcatttcccaagcaaaccgaggaactgtatttcagccacaaaacctcgatgatttggaaggaaaagaggggattgcctgcgtccgtcttcattcttacgcttt[144 bp omitted]gcgcccgccaccacacccggctaattttttgtatttttagtagagacagggtttcaccgtgttagccaggatggtctcaatctcctgccctcgtgatctactgcctcagcctcccaaagtgcagggattacaggtgtgagccaccgtgctcgggccattcttacattatttaatactggtcataccacttcctgcttccagtcagtgaagtagagttaccgctgtgtctagaagctaccgctttaggctatttgttactctaaatgtaatgtaaactcctttcctttcagtttgggtttgcctcaatcaactacgtttgccaacacttggagatgtagagagctttaagttgttatctcgtcaagatcttggaacctaggcagggcatgaacatcaatcacccaagataaacatttgtttcaccagtgtttataaatttctggggttgaaaattccccaattaggcagggtgcggtggctcatgcctataatcccagcactttgggagaccgaggcgggcggatcacctgaggttgggggttcgagaccagcctgaccaacatggtgaaacctcgtctctactgaaaatacaaaattagccgggcatggtggcgcatgcctgtaatcccagctacttgggaggctgaggcaggagaatcacttgaacctgggaggaggaggttgcggtgagccacggtggtgccattgcactccagcctgggcaacaagagcgaaactccatctcaaaaaaaaaaaaaaaaagaaagaaagaaagaaaaagaaaaagaaaattccccaattatttaaaaaacctgtgagtcatgacctccccaaatcacaattatggtaaactcccctcccccttttattttgcttcagctagtttgagttgggttttgaaccttagaaatgttttgtagttttcttcgtagatctacttcttgttgagcttttatagctatcgtgaatgcaatctgttctccatctgtgatgttttctacctggttatgagtgttatatgagaatacaatttttgtatatttattttatatctggcaaaggacttggcgttcttagtttttcagttgattctcttgaaatttccaagtagacaactggaaatatttgcaagtaagatgttaattttggcttttcctctttatttattttgcatattgcagaggttgtgccttccaaattaatgatatgtattagttatgagatgggacattcttattttgttcttttttttttttttttttttttgagacggagtctcactgtcacccaggctggagtgcagtgatgcaatctcggctcactgcaaactccacctcccgggttcacaccattctcctgcctcagcctcctgagtagctgggactacaggagcctgccaccacgcccggctaatttt[146 bp omitted]ctgatcctctagtttttcaccattaggcaaaatgattagtaatgtttagtttgtgatagttattatttagcatgataatacagtgtgtgtcctttaattcctagtttctgaagagtaatttttaaaaaacaacaacaactaagaacagatactgagctctattaaatgcctttttagtatctactaaggtgattacaaggctttactccatttattaatgagatgaatcatgttaatatgtttcctaatattaacctctctttgtacacttgagattaatttggcttgggcacagtgctttacttttttttaatt[136 bp omitted]gcctccc[136 bp omitted]ctcccaaagtgttgggattacaggcatgagccacggcgcccggccagtgctttactttttaaatagaaaactagatttattttgctattgttttaggtagggcattttagggtaactatattcataagtgagactggcatccagatttgtaagtaaatgttatctttgttgggtatggttattagagttattctaaattcatatagtgaaataggatgccttccttcttttctgtattctgaaatagtttatataacatagaaattatttttcctggaaagtttgaaatagtttgcccataaaactgcctagtaccagagtattttggggaggataattctttgtacactcctcctgtttctttctcagttactgttccatttatgttctctaattactctttaaactattttgggaacttgaagttttctagaagatcattgaaccgttaattagtataaatttataaatagtattctctaatttttaactcagcatctgtgtttatataccccttctcatccttaatatggtggttttgttttttttcttttttgccaaaatacttggcagacatttgcctatttaatctgccttttcaaatagatagtttttatatttattaataaacctactgtttatatgctttcaaatgcactgacctcttagtttgtcctgcattccttaagttggcttaatctaaagtcctaaatggtatccttaagttacctattcttatttttttctatttgtatattccctggatgctttgaattcataactgtgcttaaatagccaccctgctctaaaagctctaagagtgagcagaagcggtgtggcccacttccaggcatggacacataagcagcacacacttcatgctcttttccgcttctgaagtgtagccataaggtgcccatgacctggctttgaccaaggagatgaggatccacagagcactggtggagacaagacagagagaaagtgggctgagaatgactccatgaaaaggcaaaaccacaggaatagaagtcagatcagttgtttccagggtctgggggttcaggggatgaggagaaggcactggccacaaaggagcacaagggaactcatattcggggtggtggaaagattcagtatttttattgtagtagtggttgtagaactatttatgtttctcagaactcacagaattggtcaccgaaaaatggtgaattttatatgtgaattagatctaat[131 bp omitted]aaccccgtctctactaaaaatacaaaaattagctgggcgtggtggcgcattcctgtagtcccagctactcaggaggctgaggcaggagaatcgcttgaacccaggaggcggaggttgcagtgagctgagatcgtgccactgcactccggcctggcgacagagcgagactctgtctcaaataaataaataaataaccctaggaagaagagacttctccctccaacctagactgctcactccagagctgttccatgaaacacaaatacagttctacattctataagccacaatactgttataatatggttgcatctctctgttgtagtacctttaccctagtgtgtgtgtgtgtatgtgtatgtgttacacaaaagtattaacactgataaatagtagaattggagttagttcattttctaagttttgttcatctatattttcttcagtaaatgtgatttcgccacacataaaagaaaatataagaaatgttgcatattttagatctatatccagccaaaaagttaaattactagggcttaaaattaatctctaaaattagtacatgattaaggcggctttcaaaatcagtagaaatagggatgaacttttaaaataaatgctaatggaacaactgagtagccatctgtaaaaacatacacttcacaccaggataaactccaaatggatcaaaaacttaaatgcagcaaacaaaaccattaaaggtctagaaaaaaaatccatgaaataattcctttatgttatgtggagataacctttctcaccgtgacttaaaatctggacgtcataaaagaacaggttgataattacgactacctaaaaattagaaacttttcatgacaaaaaaaaaatcatcataagcaatgtcaaaggccaaataattaggaaaaaaatatttgaaattcattatcacacaggatccatctcccaaatttataaaaagtctctcaacttggtaagaaaaagatcagcaatccagagaaaatcagcactaagaacatcaacagactgttaagaaaaaaaaaggaaatacaaatggtcattaaaatatatccaa[137 bp omitted]atggagaaacctcgtctctacaaaaaaatgaaaataaattaatacaaataattagtctggcgtggtggcgcatgcctgtaatcccagctactcgggaggctgaggcagaagaatctcttgttgcagcgaaccaagatcgtgccattgcactccagcctgggcaacaagagcgaaactgtctcaaaaaaaaaaaaaaaaaaaaaagaaaaaagaaagaaaaaagaaaacgaaaaatacaaaataaagctcttaggtttaatcatatgaattaccaatgttctacgatttctgacctacacaaatggtaatttcatgtggttcaacttaatacaatgaaataatattttttcctctatcagactggcaaaatcccacaagctgagtgccataatctttccacgagactgtgaggcgatagtcttatacaatgcttttgggagtataaaaccactttggagggcaatctggtaaaattgatcaaaatttccactctgggaaccatcctttagctatacctctacacatataaaagaatgtatgtgctaggtacagatgagtgttcacaatatgctacctttcatatatgggcgaaaaaaaaaatatgtatatatatatatatatacagtccctgacttatgatggtttggcttaacgactttttcactttagtatggtgatttcagctgtatacagtgaggactcacagaaccatcctgtttttcactttcggtatagtattcaataaattacatgagatattaaatattattattattattattttttgagatggagtctcgctctgttgccaggctggagtgcagtggcgcggtctcggctcactgcaacctccacctcctgggttcaagcgattctcctgcctcagcatcccaagtagctgggattacaggcatgctccaccacgcctggctaatttttgtatttttagtagagatggggttgcaccatgttggccaggctggtcttgaactcctgacctcgtggtccacctgcctcagcctcccaaagtgctgggattacaggtgtgagccaccgctcccagccaaattacatgagatattaaatattgtaaaaaagacttgtgcttgatgattttgcccaattgtaggctaatgtcagtgtcctgagtacatttaaggtaagctaggctaaactatgatgttgcgtaggttaagtgtattaaatgcattctcaattaatggtattttcaacccacgatggatttattgggatgtaactgcattgtaagttgaggagcacctctatatgcacttgatttgcttgtatggtgatgtatgcgtagtgatgctgtggtcaacagtggacagcatatatcatggtggtctcataagattacaggtgccctatacaggtcccctatacaggtgcatcttttttttttttttttttttttttgagatggagtcttgctctgtcacccaagctggagtgcagtggcatgattctggctcactgcaatctccgcctcccaggttcaagcgattctcctgccgcagcctcctgagtagctgagattacagatgcgcaccaccattcccggctaatttttgtatttttagaagagacggggtttcaccatgttggtcaggctggtcttgaactcctgaccttgtgatcctcccacctcagcctcccaaagtgctgggatgacagccatgagccactgtgcctggccacaggtgcaccattttaaaatcctttatgttgtacttttattatactatttatacgtctagatacataaatatttatcattgtgttacaactgtctacaatattctgcatagtaatacagtgttcaggagccaaggagcaacaggccataccatatagccaaagtgtgtagtaggctatgtcatctaggtttgtgtcagtacactctgtgatgctcacacaacaaaatcacttaatgactcatttctcagaacacacccctgttgttaagcgaaacagacctgaaaactttctcaaagcagttactcacttagggaaggagagggagtggagaagacagggagcggggaatcaaattcctcagcgtagatgttgttcatcgtattggtgattgaagtaaatactcaaaataaaaaacaaattaagggccaggtacggtatctcacacctgtaatcccagcactttgggagactgaggtgggtggatcaactaaggtcaggagttcaagaccagcctggccaacatggtgaaaacccgtctctactaaaaatacaaaaaaaaaaaaaaaaaaaaatagccatgcgtggtggtgcatgcctgtaatcccagctacttgggaggctgaggcgggagaatcacgtgaacccagaaggcggaggttgcagtgagcccagatagcagtactacactcacgcctgggcaaccaagcgagactctgtctcaaacaaacaaacaaacaaaaacaaataaggaatttaagaagtaaaactgcaggttttgacaattaaaatgaatcatttacgccgggcatggtggctcacgtctgtaatcccagcactttgggaggctgaggagggaggatcatgaggtcagcagtttgagaccagcctggccaacatggtgaaaccccatctctactaaaaatacaaaaattagctgggcgtggtggtgcatgcctgtaatccctgctactcgggaggctgaggtaggagaatacctggaacctgggaggcagaggttgcagtgagctgagatcctgccactgcactccagcctgggacagagcaagactccgtctcaaaaaataaataaataaagtaagtaaataaataaataaaatgactcgtttaccaaggtcttataaatcatcagtgccactgtgctgcatcatttatgtacttacaactattttttgccatcccccccaccaaaacaaataaaaaaccataaatgtgaattccatcactaggctgacgatcctgactgcctccctggccagtttctccaccttttctatgtcctgcttgggggagggctgacccccacatggggcaacacctgggctctcctgacttcggtcttcctctcgggtcagccaaaggaggcactggctggaggtcagaggtcaaaaggctaaagctgggggattggagttgcttctcctgttctcttcttgcatcagcagtggttctggcaatggctgcatccccttttaagcaaatttcctgtctgctgtgatctcctactgagttctagtaacactattttctccctcttactccttagggcctggaagcggggtggaattaacagtttcccactattgtttattcttaggtgcccgtcagggatcagaacgcgataccccagagtatggcactttggcatgctgagtactttgaactgagggagactgggaggcatcagaaaagcagggcctttctgaccttctcccatcctcctgtttcctgcccctctttgtcctctgagtcacagaagccagaattcctcttcccagaggctggtcttagaagctagaactcttctcccccaaaagcaagctataaaacctagaaaggtcactctctcccttctcccttgaagaccctcattccaaagggtttctgccccatacctgggagaaaggaaagctacacagagaggccaagaagacggaggttagcgatagaaaagcacaacagatttatttaatcaaagttgtatatgacgtgggggccttcagcaatgaagacccaaagacccaaggggaaaatgtccatttttatgcttagattcaatgaagagtggacagccatgtagaaatgtgatcaaacaaagacggtgtgatctaatagtaatagactgagtggggaaaccccgcaggacctgtctgctcagattcctcttggtctgtctgtgtgacattccttcctcccggggatagggcaggacccctttggaatgaaggtcttatgatctactttcagacaaggtaggtcagggaatttctttatggccagctcctacacagaaaggcagagtagaattagaggattatttctacgttttgagggagaaaggttctagttcctatgactcaccttggtgaaaaggaattacagccaggcgtggtggctcacgcctgtaatctcagcactttgggaggccgaggtgggtggatcatgaggtcaggagttcgagaccagcctggccaagatggtgaaaccctgtctctactaaaaatacaaaaattagctgggcatggtggcgtacgcctgtagtcccagctacttcggaggctgaggcgggagaattgcttgaacctgggaggcagaggttgcagtgagccgagatcgtgccatagcactctagcctggaggacaacagtgaaactccgtcaaaaaaaaaaaaaaaaaaaaaaaggaattctagtttctatggcctgccttgggcagaaagggaagcaggagaaggtcagaaacagactttgcttctgaagcccttccaatgtccttcagttcaaagtacacagaatgtcaaagcaccatattttggggtatcgtttgcaaagccccaacataattgacatggtgttaaaaaccccaaggataaacataaaaggaacctaaaaaaatacaatcagaaattttcaggaagcctagttttctttttttttcaaaagtgatttttctagttgtttgcttccaataagcagcttattctttaaattctgacttgactaataaggggggtaaggggtggcaaattagggggatcctttgaaaaaaagaaaacaagaaccttccccattcttccaaagagccaatatccagagctctttgcaaaactgttagtcctatctctagaaggacatttttctcacccatttatattgtaacggaaaatatcttccacgaagcaaacatttttgagatttcagctttcaaatgcacggtacttgtgataaagggtgttttcaagccctcttcttcacttaacctgccagctaacatgggaaaccattagctcaggctgctacaattaactcagggcttcttcttgaaaggctcacacaattcccagctacttatcatgcaaacaacctgggagactcattttccttgcaatgcggtgggaggggtaaattacggagataagtagattattggggaaaaagtcacactcggaggccttatgaaatgattaaactctgggaaattcatccccctaaatccctggcccctgatagtacacattcattactggatcctgggtaatgtacaatgaagaacctcctttagaagcaataaatactcccactccgctgaattttcacttaactttttaaacagtgagttctgtagttttgatgagtgagagtcatcatatacgaagcaaattaaaggaaagggaaggggtcatgagacttgtaagatttttaaatactgtactgttttgctaaaataggaaaagtacaaatattaaaataaaaccaataacatataactctagaaaaatagggtcttactgacttccttggattaacttcataaactccatatcaacagaaaccatttcatatttgattaacagccttgttcaaatctattatgacaaaatatatactctctaagaagtatttcctatagcaaatatttgtcaatagtcaagttgactcttattagtcaagttgactcttattagtcaagttgacgaacagcctgaaatgatgtttcggaaagaaaaagtctaggaaagtaacttaaatgaatgtaaccatgagctggagacagaaaatgaaccctcatttttctggcaaaagggggaaaaaaaacaacatacaaacacacacacaaaaaaacaggcaccctgataaccaaaatcctaataagagaacttcgtggtggagactgttagtatcagcgttgactttctactcccagctactgaattgcagattcagattgcaacctcaggcattccaaaatacagcagtgcactcacttaaaatcgctcttggaaatacgcgaggaattgctaactctctaagtaaagctgagcctttttgatagaataaaacacatctgcttcttccttataaatagactattcactacctggaggaattcagtcttgcccccacctgtctgcttaaagtgaagatctgctttgtgaggtacaatgtaacctgctcttgtctcaatacaaaaccttcagtaaaggctataatttatcaaaattcttggagctgcttttgtatgtgagcaaagagtgtgcacctgttttgggaggagagtgggacaggatgggctgagatgaatcttgtggggttggggaggggtggtccacggagatctgttctcatttgatttatagtaaggctattccaatttttataaatgaaatacctgaagcttggagaggttaagtaacttacccaaggtctcgatgttagagctgggattcagatctacactgattttggaacccaaagtctaaatactatactagacttatcttggaagacagtagagaacacaatcctagtttgatatctcaaattgctgtacttcacttatgggagtagacattcctggatggaacagaattgaagattttgaaagaggaggagtcggccgggtgcaatggctcgtgcctgtaatcctagcactttgggaggccgaggtgggcggatcccaaggtcaggagttcgagaccagcctgacccacgtggtgaaaccgcatctctactaaaaatacaaaaattagccaggtgtggtggtgtgcacctgtaatcccagctactcaggaggctgaggcaggagaattgcttgaacccaggaggcgaaggttgcagtgagctgagattgcgccactgcactccagcctggtagacagagcaagactccgtctcaaaaaaaaaaaaaaaaagaggagaagtcagtggggtaatacagaaaacccatccccctggctattcgcagctgcctgaaatatgtatctgcaatggaatgatatgtatttcacaacagaattgagattcaaatgagaatgcacagcaagaaagtaagacagaaagaaacaattttcactaaaaaaacttggtgtatatattaatgaagaactgcttttagaaactgcaatatgtaatattaacagtgagataataatcacatttatagttaaatagaaagaaatgtttttaatatccatgaaatgaggcacatatatcttggcatccctatttgaactgtgattaaaatagactgacggaatataaacagagtctagttattaagaacacagtcagtctgaagcccagttcaaccacttactagctgtgtggccttgggtaaatcactgaacctttctgtgcttcagtttcttcatctgcgaatgtggatattacatgtccctatctcattggatggttgtgaggattcaatgaaataatacatcgaagtacttgaaacagtgcctgataacatggtaagtactttataagtgttagtgttaaattctctttttttcttttttttttctgagacggagtcttgctctgttgcccaggctggagtgcagcagcgtgatcttggctcactgcaacctccccatcccaggttcaagctattctcctgcctc[134 bp omitted]cctcctaaagtgctgggattacaggtgtgagccactgcgcccagcttcgttaaattcttattaaacacataaaaaaacctatataagcatgagactctttttttttttgttttttgttttgagatggagtttcgttcttgttgtccaggctggagtgcagtggcgtgatcttggctcaccgcaacctccacctcctgggttcaagtgattctcctgccttggcctcctgagtagctgggattacaggcatgcgccaccacgcccagctaattttgtatttttagtagagatggggtttc[145 bp omitted]cacaggttaaaagagtaaggaaattcagtgctggtgggaaggctgttgaatactcactgagttgaggcttatacagaaatcacgcaagctggactgatttgttaggagagcaaggcagaattatgagacggaaggtcacttgggttaaagagcaggtctgagtggagttagaaagtggaatgacaggtggttacattacagagaggaatttttagagttagaggtagaacagttccagatgtactaactccactctgcagtcacggagatggagaaattatgacctagagtgttggatagatcgtcaaggtagaatcttgcgtccccaggcatcctccagggaaatgggttaaagaggtcactgtgggccaggcgtggtggctcaggcctgtaatcccagcactttgggaggctgaggtaggtggatcacctgaggttgggagtttgagaccaacctgaccaacatggtgaaaccccctccctactgaaaaatacaaaattagccaggcatggtggcgcatgcctgtaatcccagctattcaggagactgagacaggagaatcacttcaatctgggaggcggaggttatggtgagccgagatcacgccattgcattccagtttgggcaacaagagtgaaactctgtctaaaaaaaagaaataaataaaaataagaggtcactgtgaattgagtgtcaaaatcctcaaggaacatgggtgggtgataagaaagtcaaaacgtatcagtgaggggttttcgttgaagatgtcgacatccactgcagccggtttagcaaaagagggctttttaaaaaagggaattaggagcttataaaaccttcaggacaagcagaaaacccaaccaagttttgaggattcacaatcagcaccaatagatccaataatccaacaggacagttcctacagaaatgccactgctgcagctgtctgccaagggttacagagaacagtaggaactaggtgccagaatctgctgaacacaaagagccaaatgtccccagctgccatgcccatcacaagatctgatcccctgtgcacagctaacaccctgtaagggtcacttctatctctaagtctttttgagacggagtctcgcttctgtcgcccaggctggagtgcagtggtgtgatctcagctcactgcatgcaacctccacctcctgggttcaagcgattcttatgcctcag[176 bp omitted]agcctctccctttaaattcccataacagtttacctataggtctctctatttactttaagttctcataagagtttacctacatttctctgacatcactgatctcatttggtttaacagttatttatatacacgtcttaactcccctactgaactaagctttctaaggcagtgtatatgatctactgacttctgtatttttttcccagcaaccagtgtaactccttgctctctaaaaatgtttgatgaatgaaagatgaattaacactttcatgccctctattatatcatttggtgatttccaatgtccgtgaggaatagaattgccaggtagtcagccaatttgttttgaggtttattctaaccaaaatgctaaacttctaaaaatgctcataattctgggtcttgctatacttatactacagacttcccattagatcatgagattgggaatatatattttatatctgtttttttgttttgttttgtttttgagacggagtctcactctctctcccagtctggagtgcagtgatatgatctcggctcactgcaagctccgcctcccaggttcataccattcttctgcctcagcctcccgagtaactgggactacaggcgcccccactcccatgcccggctaattttttgtattttttttttttttagtagagacggggtttcactgtgttagccaggatggtctcgatctcctgacctagtgatccacctgccttggcctcccaaagtgctgggattacaggcatgagccaccatgcccggccgcttatcttttatatctgtatataccctgaggaatatcctaagccccccagccgactgaatggattccccttggccaagggtagc[135 bp omitted]cccgtctctactaaaaatacgaacattagccagtcgtggtggcatgcacctgtagtcccagctacttgggaggctgaggcaggagaatcgcttgaatccgggaggtggagtttgcagtcagccgagatcgtgccactgcactccagcctggcgacaacgtgagactctgtctcaaaaaaaaaaaaaaaaccaacaacaacaacaatagtaacaaaaacaagaaaaaaacaaaaacaaaaacaaaaaacaaaaaaaacctgagttcctggccatgacaggatgggaagtcagacacctcattataccccctccctcactaaccaccataaggctttctttcctaagagttaaaaaaacaaaaacaacaaaaaaaaaaaacaagcagcccttttgagacttgctccactgctgatttacccaactgaccagcattccctcctggtaagagaccatggaccatggacaggttctggccagtttacagaggctgcacgcagcatgcttctgagtcttccatctcaccctttgatgtaaagagcccaattctaatgcatttaaatgctaagtctccaccccagagggaaaatgtgggatgcgtgtcacatgcatttgtttactacacatgcacaacccttttcataaatattcataactcctataacatgttgactatgtatatttagccaacctgttcagcataaattcctgtctcatgcttccctctctcaaagtgcctgcttttggtttctatcggaggctatgcttcccagcctgcaggatggccggcctacaaaaataaagctggtgggcatggtggctcacgcctgtaatcctagcacttcaggaggctgaggtaggcagactgcctgagctcaggagtttgagaccagcctgggtaacatggtgaaacgctgtctctactaaaatacaaaaaacattagctgggtgtggtggtgtgtacctgtagtcccagctacttgggaggctgaggcaggagaaaggcttgaacccgggaggtagaggttgcaagtgagccgagatcacgccactgcactccagcctgggtgatagagtgagactccatctccaattaaaaaaaaaaaaaaagtaataaagctctcctttccaagtatatgaacctcgtgattcatcagttgacacccctataatgtctactgtaggacatgctcaaaggacacgtgatgacttgtctaagttcagatgttatctgggacatgtggatgggccctgaactttgtctaagtatgatactgtaatttataatgagaaatatatatttggccttgtttaatttcctggcagctgatcctaaaacctttggaatctctaaagtgataagtgtctttctgaatgttaatgagatgatggctgactgggggctcctagatagcatcaggatgggggaacagaggaagcaactgtatgattaggaggtttgaactttcagccccatcccatgacctccgggaagaggagagcagctgaaggttgagttgatcaccaatggtcaataatttaatctaccatgtttatgtaatgaagcctccacaaaaacccaaaagtacagggtttggacagcttccaggctgctgaccatgtggcggtactgcgagggtggcatgcccagagagtgcatggaagctctgtgcccctacccataccttaccctgtgcatctcttatatctgcctgttcattgtatccttttacaataaatgagtaaagtaaatgaagtgtttcttggagttccgtgacccattttaagcaaataatcgaacccaaggaaggggtcctgggaacccccaatttacagctggtcattgagaaattccagacactttgacttgtgattgacatttgaagtaggggacagtcttaggggccctgtgagatttaactctaattccaggtagatagtgtccattgcattaaattacaggacatctaattggtatccgccagagaactgatgagcaaggaaaatcattcacacctggtatcagaagtgaagcattgcgggtgaggagagtggaataggaaaagacagtcggttcttttttcctatctcacgcactaaggtgtctataagatttctgtatgatatatttgtgtagatgaaaggaataagggacattagactggatttactctggaaaagatatgatctaacacaagagaggacaagaggcataaaagagccatagctctgtaacaatgaagagaactgaaaaagaaccagtggtgaaagaaagagctctatacatttctggaagacagaacgtaaatgggatagggctgactactcaaatcaaggaagtagtacggcctagaaaacacatgaggaagagccggcactgaagagggcaccaacctgccaagcacacccttgagatgtagagatggcaaagcatgagtgagaaatggggctgaaaacaggattcactgaagatctttacacagaccctcccgcttaccaagtgataaaaccgcgccaggcaaataagtgtcttatctatccacaaaaagcaaggctgttggccgggcgcggtggctcacgcctggaatcccagcactttgggaggctg[134 bp omitted]gaggcaggagaatgtcgtgaacccgggaggtggagcttgcagtgagccgagattgcaccactgcactccagcctgggtgacagtgagactctgtctcagaaaaagaaaaaaaaaaaaaaaaagtggggctgttttctctacacaaatcaagcaaactatctctgggagactggagctgctagtgtaggtaggtgttgctgtcctagaacagagtcctctgctttctggaccatgtcagggttggggcagggagtttccccagtgacctggatgcgaggcccatcaatcagccagctccatccacatttacatagagcttcccattggcctttctacttcccaattcttacatatgaactcgctctgaagatacatcacacacttgagcaaagtctatggcatgctatagaaggcacagaataagcaaatagaaaaactgactctagaggacacagaaataattttttttaaatacttcaagttctagggtccatgtgcacaacgtgcaggtatgttacataggtatttatgtgccatgttggtttgctgcacccatcaactcatcatttacatgagatatttctcctaatgctatccctcccccagccccccacccaccaacaggccccagtgtgtgatgttccccacccaggacacagaagtaattctgataacagaagagaacttgaaaacaaaatacaacatgtggaagactcttgttagtattcttgaagaaactagaaaaaaatattgtacccataaaaataatgacagaatccaatggagaaggaataatctagaataagaaagagcacttggaaagtaaatgacccacaccctaaccatgttttgacatttcagaacagcaacaaaagaaaggccctaaaagcttccagagtgaaaaacgaacaatacggcagtaacaagataaataaaaacaggtcacaaacaaattggactcgtgtcagagttctcatcagtactggagatgatcagacattaaagctccgaagataaactattatttagaattctatacccagtaaaactatcaagcatgaggatggtataaagcatttttccacatgtgagaattcataaggcataccactcttgcccccctgttttagaaggtttagaatatagttcaacaaaatgtgaaaactgtgataaaagggaaaaaatgagatcagagaaacagaataatcacacaggataacaatgaatagaaatgccagaatgacaagcagttctcaaaacaggggtgcagagccagtgcggattggagcagaagatagcatgtagaagggagctctccaggaaaatcaataaagagtaaatgacaaactagcaaacaaccaaagaaataaatgaataaatacattcccctagagattatctgatgaatttttccacgtggaaattagtactgtgaagcattttaagagatgttgatatattaaaaaattacccacaagtgcattaaaaactaaagaaaatcccaggactttgggaggccgaggcgggcggatcacaaggtcaggagatcgagaccgtcctggctaacacagtgaaaccctgtctctactaaaaatacaaaaaattagctgggtgtggtggcgggtgcctgtagtcccagctactcaggaggctgaggcagaagaatggcgtgaacctgggaggcagaggttgcagtgagccgagattgtgccactgcactccagcctgggcgacacagcaagactctgtctcaaaaacaaaaacaaaaacaaaacaaaacaaacactaaagaaaagaaaaaactgcattatcgatacctggaaaatttaagttatacaatacagaaaatgcaacagcagcacatcatttgattcaacaggaaacaagatttacagtcatatcccatccagactggaacaagaagccagagggtttgaggatcttggtctccagggaaaaaggaagattcggttca[131 bp omitted]aaaccctgtctctactaaaaatacaaaaattagccaggcctggtgtcacacacttgtaatccgagctactcgggaggctgagacaggagaatcacttgaacccagggggcagaggttgcaggagctgagatcttgccattgcactctagcctgggcaacatagtgagagtccatctcaaaaataaataaataaataaataaaataaaataaaagcaaactggaaactctaggaaatactaaaggtgatgtttaaaaaataaaaaataaaaattttactggccaggtgctgtgtggctcacacctgtaattccagcactttggaaggccgaggtgggcagatcacgaggtcaggagttcaagaccagcctgaccaacatggtgaaatcccgtctctactaaaaatacaaaaaataactgggcatggtggcacgcacctgtaatcccagctactggggaggctgaggcaggagaatcgcttgaacccgggaggtggaggttacagtgagccaagatggcaccactgcactccagcctgggtgacagagcaagactccatctcaaaaaaaaaaaaaagaaaacaaaaaaagctagcaaattaaaacatggcatggtttgaaaccagtgatgggaagaaaagacaataaatgttaatattctcctttgattaccacaaggattatgatttgggaattacagggagggaaatatcattaaccatagctcatttcttggtattacactgtataatattcatatacacataataatatgaaagttatttactggctcttaacttctggaaccaacttaaaggtacagtatagaaatcttccttgtggccgggcatggtggctcacacctgtaatcccagcactctgggatgctaaagtgggtggatcacctgagatcaggagttcaagactagcctggctaacatggtgaaacctcatctctattaaaaaaaaaaaaatacaaaagttagctgggtgtggtggcgtgcacctctagtcccagctagtcaagaggctgaggcaggagaatcacttgaacccaggaggcggaggttgcagtgagccaagatcatgccactgcactccagcctgggacagagcaagactattttccaaaaaaaaaaaagaaagaaatcttaattgtgatcccaacggggcctccaaaaaaaaaaaaaaacttaactctagttaaattggagtgcaaacgttatcaacagctgatagaaatgaagggcagagagacgagagaagaggtagaagaaaggtgagatggcatactgtctataatcagtgatacaggaaaaggaaatagagctttaagtgtattaaagttacaatagcaatacacagaggaataaaaataacgacatgggaaaggggagaggtatgtagagcgtatgaatgaaaccctatctatatcaggaaatcaataggtaatgtctaaagttgaaaaatcaaaaataggccaggcgcagtggctgacgcctgtaatcccagcactttgggaggccaagatgggcagatcacctgaagtcaggagttcgagatcagcctggccaacatggtaaaaccctgtctctgctaaaactacaaaaattagccgggcgtggtggcagatgcctgtaatcccagctacttgggaggctgaggcaggagaattgcttgaacccaggaggtggagtttgcagtgagctgagatagaaaaagaaaaaaaataacacatataaatatactacttatttatttatttattgagatagagtctccccctgtcgcccaggctggagtacactggcgcaatcccagctcactgcaacctccgcctcccaggttcaagcggttctcctgcctcagcctcctgagtagctgggattacaggtgcacaccaccaccctggctaattttttatatctttagtagagacggggtttcaccatgttggccaggctgttctcaaactcctgaccttgtgatctgcctgccttggcctcccaaagtgctgggactacaggcatgagccgccatgcccagcataaatataccatttattaatatgcaaataatcgccaaaaaacaggaaaaggaaaaatggttcaaactgattgactctggagatcaggacaggggataagaagagatggggcaggggccagctgatttgtttaaaactgtgtagatgcattatttaagtgtgttaaaagattttcacagagtaaacatgtactctggaacctgaactttttggctcatgactgctaagaaattaacctttgacaagtactattggattcacttatttctatcagaatacgttcgtcccagggctatccagaccccagccagcagtacacaagtcctcagcagtacccagatgacatgccacagggcatgatgtgaaggatggaggaagtataaatggcgggttagcggtcatctcagggaatttcaactctaggtcattacaaagaggaagatctcccctgggctcactgccggaataaccctgggtctcaccagacttccatggtcctgctggacagaataagtaaaatgtctgatattttccttttgaaagcactaggaacagctcaaggatttgcacagcagaatgaaagaggagctgtcactgagttccttaggactcacagcttgaaaggaaggaggaggcccacagggggcctgaggaccaagcccagcaggggacgctgagcacttccacagcccagggggtgggaccagagctcttaaagccacagatctcctctgcaggcacagagaccctcacagcagggatccattcacaccagtcacccttggagactgctatttatgctaaagaaatttatcccactgcattgtatgcttcttgtccagagttctcttggatcccttgtttacggccttagtcttatattgtgagcagtggaatggacaggccatttaagagggcagggatggctaatgatgggtctgttagccctgcagtcagtctttcctttgtgaaccaaacccaatttgggtgcatttgctaaaaaaaaaaaaaaaaaaaaaaaaaagaggcaaaaccctcatttgaagttgaagaaatgttagttgtattccattccttttatgaggaaaaaaaaaaacacaaacacacacactggaagaaaccaaaaactttataatatttatgatccattctttcggtggtcaaaatacatatccgattttttcaggtgtaggtacaaacactgtagttccttaagattgagaagatcttaaaaaatagggggtcttttcatcactagagagatgctaatttttatcttgcaaaaagtaaagagaagccccttcagaaaatgttttcttttgaggcagaacttaaacagatgccaatgctttcatgaattttgtgagctaaatccttataaatcctttgagttgacagatcaattattccttctaacagctaatgaactaataacccttggaaatttctccttccttgggtttaaaatagaaaaaaagaaaaccttagggggaaaaaatcaattaaagactacatagcaataagaatcaattaaactcattataactttttaaagagagctatattttcttcaagagctatgatttttaaattaaaaacacgtcaaataactctgtattttataaaccacaaatattcttaaaacatgtctttaattcacattgtgtccaggcaaaggaaagtgagaaaggctagaaaaacagaaaaggagacagagatggaccttgcagaaggcaatcagaagaacggtgggatcacggtgggatcaccgaatgcctctctgtacaaggcaccgtggtagactctcagggcaccagaaagagaaaaagacatacgcacacagcactggagaaaaaatgaagagaagagagaaaggaagggagattgcgttactccagaatgctctagacaacactgtgaagagaggaggcctgtcctgagcgtcttgctgatagaagtggagattagcaggagttggcagagtccatatgctgggcattcaaggagttaggcccaaacgggacaatgaggaccagagcaggtggcagaaagggaacgagaagaatgggaatgcacgcaggtgctggaggtgagccctgatcccaagaatgaggtggtacctgctgggggaatgggacacaggcgcagtggggcggagaggcatcggtcctatttgtggatctgacatcatggccaaagattttaacagatgagaaaactgaagcaatgggaatttcagtaaaagacttgctcaaggtctcagggcatccctctctctctctctctctctctgtctctctctctctctctcacacacacacacacacacacacacacacaaacacaaacacacactccagttgtacgtgtatgtacaagaaagtctgtgctttgtttttaattaaggaactagagcatgatggtcatccaggtaccagcccacaaacgctgctcttccttcctgcagtgcagttcttggaagtgaaaagcaaagtctcatttgaaattgagtgagtggtcttttttccaaattaacaactctggagggtgatacctagagaacatggcgcacattccaggggatgctgacagttctccaccctgtgagctcctggtgcgcagtgtgatggggtgtaaagaaagggaaacctaagagtcagaagaggccaggtgcggtggctcctgcctgtaatccctgcactttggggggctgaggtaggaggatcacctgaggtcaggagttcgagaccagcctgggcaacatggtgaaaccctgtctctactaaaaatacaaaaaaattagctgggcgtggtggcaggcacctgtaatcccagctactcgggaggctgaggcaggagaactgcttgaacccgggaagtgaaggttgcagtgagccatgattgtaccactgcactccaacatgggtgacaagagcaaaactccatctcaaaaaaaaaaaaaaaaaaaaaagagaagagctgggtcagcatcacagctccactcttatttggcctcagttgctctgactataacagggatacgaatggtccctgaccatggttccacttacaaatttttgacttcgagatgatgcaaaggcaatatgcattcagtagaaactgaattttgaattttgttattttcctgggctagtgatatgtggtatagtactctcttgtgatgccaggtggcagcagcaagtacagctcccagccagccacatgatcatgggagtaaacaaccagtattgtactctgtgatgtactgtgttgccagatgatcttgcacaactgtgggctaatgtaagtgttctgagcaccttgaagataggctaggccgagctatgatgttcaatagattaagggtattaaaagcgttttcaacttaacgatattttcaacttaagatgggtttattagaacataaccccctcataagtcaaagagcatctgtaattatagttatacctcaagttgtgaataggaataaaccaaccatagtttattcctatggtgataaaccaaactattcataagggcttataaggtatgtatagtgtatgaatgaaaccctatctatatcaggaaatccccaagacccatctatggacttgtggccctgttaaggtaaagctagggccagctttatgggtgtgtgaccctcagagatgacacagggttcccatgttaaagggggcccatgcttgattcaacactctgctgttgccatcttgacattcttgataatttccgaacaaggggccctgcattttcattttgcgatgggctgcgcgaattacatagttggtcctgggtaaagtcacttggttcagtgggaagagctcaggaaggtttccatctttggcaaatacttcccagtagactggaagtttgcagtgaacatgtgtttgctttccagctgaacccatttcttacatttgaggaacgcttcaccatacgggtcttggcaagaggcagggccacatgggccagatactggcattcctcagccttcctaccagctagagcgtggccagccaggtgcaatgactctggagtgtgcaatgcttaaagtatgaaaggagagtggaaaattcactttggtgatggcagcagtggcatcaattatctagggacataaatggcagcccccagctatggtctctggtgtccagcgctagccatgctagctagtgggaaaaggttgggggtcgggaggcatccagcagtgtgtcaatgagatcctccactagatgggtctgtgatgaggttgcagtcttggttttagccacctttggttcttccctgtttcctttttttttttttctttttgagacagggtctcactctgtcatccaggctagagtgcagtggcacgatcatggctcattgcagccttgacctcctgggctcaggtgattctcccacctcagcctgccgagtagctaggactacaggtgcctgtcaccatacctggataatttttgtagagacagggtttcaccgtgttgcccaggctggtctcaaactcctgggctcaagtgatctgcttgcctcagcctcccaaagcgccaggatgacaggtgtgagccactgtgcccagcttccttccctgttttctagcctgttcatctagtcttcttggtgatttgcttttcaaattactcagtgttctttcgataaattccttttgcacttatgtggtcagagatggtttctgttgctcatagctacgagctttttctgatataaagttggactctggtggagttacgaccctgatcatcctttggctgagaggcagaaaatgggtcctgtgtcctgaggcagaacttgtcggccacatgtccctggtgataagacactagtgcttatgcattccaacacagaagggacatgggagactgcatgggtggaaaggcacaatatctttcctcacccattagcagggtcatggctgacattcctataacaaggatgggttaagaagacagaggcataacagatttatttaatcagtgttttacttgacacaggagccttcaaaaatgaagatctaatggctgggcatggtggctcacgcctgtaatcccagcagtttgggaggctgaggcgggcagatcacctgatgtcgggagttcaagaccagcctgaccaacagagaaacctcatctctactaaaaatacaaaattagccgggcgtgatggtgcatgcctgtaatcccagctattcgggaggctgaggcaggagaatcgcttgaacctgggaggcggaggttgcagtgagccgagatcacgccattgcactccagcctgggcaacaagagctaaactctgtctcaaaaaaaaaaaaagaagaagaagaaggaagaagaaggaagaaggaagaaggaggaagaaggaggaagaaggaggaaggaggacagaggaggaaggaggaaggaggaggaggaaggaggaagaaggaagaaagaagaagaagaaagaaagaagaagaaggaagaaggagaagagaaggagaaggaggaggaggagaaggagagggagagggagaaggaggagaaggagggggagagggagaaggagaagaagaagaaaaagaagatccaaagactcagggaaaactgtctatttctatgcttaggttggatgtgaatggacagctatgtagaaatgtgactggacaacaaggggtatgatctaatgttgatggacagagaggggaagcacagtaaggcccgtctgtttggattcttcctggtctctctgtgtggcattccttccacctgggtacagggcaggacctctctggaaacaggggtcttatgtcctacttttagacaaggtagggcagagaatttttttctttctgtttctgagatgaagtctcactctgtcgcccaagctgcagtgcagtggtgcaatcacggctcactgcagcctccacctcctgggcctgagtgatccccctgcctcagcctcctgaatactgggactacaggtgtgcaccaccacacccagctaatttttctccttccttcctcccttcctctcttttttccttccttcccttcttccctccctccctccctttccttcctttcttccttctgtccttccttccttcctccctctccttccttctttccttctccctccttccttccttcttttgtctctctctttccttctctctcattctttctctttcctcctttctctctctcctctccccccaccccctctctctttctttcttttcttttctttctttctttcagagctagatctcactatgttgcccaggctggtcttgaactcttggcctcaactgatcctccacctccagagaatttatttataaccagctcttacacagaaaggtggtgataggttagagttatatacctaggtttttgtggctggtattggagaagttgggttctagtttctatggcctgccttgaagagggattctactttctgtggcctgtcttggggaaaagggaaggaagaaaaagaagagcaggagagggtcagaaagagacagcctttgaggcccttccaaagtccttcagttcaaagtactcagcatgccaaagtgctacactttgggtcatcgttttccgagccccaacaaggtcatctggtccacactccttctgaacgtgggaatcctttatgaataattcaggatctgaatagcattcaacaaaagatgctactgaaaaccacagtgtgtgctaagcagaaagacttgatcacgggtgacaaacgctgaggttggccagctcccagttgtactgttcagggtcaatggccctcttagggctgtaaggatatccctaactgtcatcaaattgtcaaggctaaagttcagggaaatccacctcactcatggccaaata[140 bp omitted]catggtgcaactccatctctactaaaagtacaaaaattagccggctgtggtgacaggcacctgtagtcccagctagtcaggagtctgaggcagaagaatcacttgaacccaggaggtggaggttgcagtgagctgagatcgcgccactgcacttgagcatgggcgacaagagcgagattccatctcaaaaaaaaaaaaaaaaaaaaaaaaaaaaaaaaagatggtgtctgagtccctaatgaattcccagagcataatgggactaaggtgctctgggattctgaaatctacagactacctagaaaagttcccacagaaacattatggccatagcgaaaacaaaacacgaaaaccaaaaacaaccaaagtgccaaacatctgcattgaggatgctacaggaaattactttcacctccttttataggcatgttcaatcaatggcaacaatattctacattttgctaagggctgaaggaagagaaaagagagtcaggaccagctcattttccaacacttgaaatgaactcctggctgaaactaaatcactcgctctctggcatcacggctatttctacagtgccacttggctggctgggtgattttccagtcactgggtgagggacactggatccaggacagggccatgagcgtgttaagagcagaaagacccaattatgaagaatcccctggaaagcccacaatgtagcccacccacctgggtctgaatggcaggcatgtgagcagaggcagaaaagcttcggtgccaaatgggggaggatgcagagccacttcgagtcccatcggaccactcaggccgttgcagctggagctgcctgcctgaggcaaagtaatgccaaagtgagcggtaggagcccgtcacagccaagcaaatggcaactggacagagttggccaagggctgccagacatgatagagcagggaaagaggcagagatgagggaataaggcagctgtcatttatttgggagggaagaggttggatcctgtaagggcaatagggtggaggggagggagagggctcagagggcctagggtcagattggaagcagcagaccccgaagcgtgctgatcctgaggcagagggtgcagctggtcatagctaagaggaaggtgaaggtgtgcaggccccttgctcagaggggagcagagggcagaggtgcgataccctgggaggtcccgcggcttcaaagggaaagggagaggatgggcagggagagagaaacaggaggcagagtccctccgtaagctttcccaagtgagtaaagtactcatacccagggctttatttgaatttatcacctcttattagtgtcttttgaaatgcgaattagctgattaaccactgctcacagccttccaactgttctttattctccagcattcagcaactttgttctaaatagggtaggccacagtagcccaccagggggaaattattctcaaggttacaagaacagcgaccaaggcaaaattaggccctggcctggatggaatcaagttgggagtgaggttgtgcctggagccaggctctaaccactcccaccccccaacccggtctacacacaaagcctccgaggatgctggttaccctggtgttagtccatccttgcgatgtatgaacagggctctggggaacaagatacacactcttctgccccctaccacttttttgttgatgatcaccattttctaaaaggtttattagttctaggtccctcaggaatgcccgtgcactggcttcggctttctgtttgggacgtgggttcacgtttacgaacaacaagggatggcccctggcagagcctcgttcgcactcgctcctgcctccagtttggcaacacaacacaaaggcggtatggcttgtatacactttccaggctgagcccctattcagagggggctgcagcttgcgcgtaatgggccccctacagacaaagccagcaagtttcttaattaagtctaagtgaaagacagatcccgcttacatcttcagagaaccttccttcagaacttcaaaaacagcctagactgcctatcaaatccaggcacgaataactagctagcaattttttctctttttaaatatagaaagccaggcctccggcgccaactcttcaaccccctctcactttccctgcaattttagacatgcctctggtttataaaacaggaaacaaagggacttcttgtgtgtcggagaagccctcagagggcctgcatttcattccggccttccccaaagcactgtgctgtctaaagagctctttaactggtttagtctcattaccatttccatgaggtatcaaaggatacgctacgaaaccagcatatgtacatatatcacataaggacacatcctgttacgcaacgatattaaaaaattaattattagctaattgccttttcagaaatgtgatttttcacatccctccctcccctccccctccaccctagccccagaaaccctctctcagacagacctttctgttttctgggctttgctgtgataatgttccttgcaaacagaaaccaattattctgcagcagtaagtcaccaggagtatgaattgctttaatttttcccccttttagcagctgcccagggtgggttgcgaggtggctgcagtaatgaagctgggatgaatactaaagcaggaccgaggccgggtgtcctgcagggaaaatgatgttcaaaaataaaagtgcgtttttgttgggagaagctaatcaatgaattggacgtttccaaaaaatgtgctttccgctctcaatttgcatcgccaatgctgctttccccaatgagtcctgtgcacctgactagcttgtaaaaatgtcaccttactgttaaagtgctaaacacgccctgtttttcctccgcctgttctctctctccctcccccctctctgcctttttccttctgcaattctttgctttctcattagaaatgcccagcaacgtctggcagacaaagacactgcaaacaaagtgtatggaaaggaaaaaaaaaattaaaagggaaaaaagtgcagaggaattcttcattcacggatctgtagaatacattaatatctgaaactgttggcacagcctaaaatacttgggcggctaacaatgcgggcaatgattccgagtctgggatcttcaaataaaccccagcgctgtcatggccaccaggaaggagaataatggcgatattagctgaccttcattttgttgtttcttcagtcctgactgctggacctctgtttgcttgttactaggatttcttagctgaaaaattttagcatttcccaggcaatacaagagccagtttattaggtaaataaaccaggccttaagcagtcttttctgctccataatgggaaatgggcaaattggaacgagggttgagttggagtcagggagaatgactcagaggcagagatctcatcatttccccctcatccaaaacaccaatgaacaatgcggacggagttaacaaatcatcagatcgacgtgctgcctttggttaacttaaccaacatcatccaccaagtaaggaagacaagattcacaaaaggaagggacaaaaatagcggctttcttcttctagagacctagatctgtaatgacatttcacttctcccaaggttccaaggaactggagactattttataattcatccaaatggagctaatggtgctatgtttcagtcatctgtcataaatgcttaaacattcttatgttattcaaaccattgtctagtgacaatcttaacgatgttaataaaatcagtaatgcagaactggatcctttttcagagtctctacatccagagggccttctggctgtctagactgtaacacaattggtaattattacatttatgtgtgcctgcttactgtttactatctcgattccctcccccaactgcaatataagctccctgagggcagggaccaccattgtatcctacctcacccaacacagtgcctagcacccaagacgtatttgcctagggaggtaatgatatttttggctacctttggggaaatgcatcccatctttaaaagctttcagctgccacgcccaagggcttcaagatgagaacgagacacaatacttcttaaagcagagtattcccctaccgagaatgaagatatgcgtccaagtttcctgtcgcttccagctttcaattcttttttaactgtgctttcttttgggattaaaaaataataatctcaatttttagattcaggaggtacatatacagatttgtcacatgggtatattgtgtgacactgaggtttaaggtacgaatgatcccctcagcgaggtagtgagcacagtatccaataggtggtttttcagcctttgctcccctccctctctcccccacaatagtccccaatgtcttttgttcccatctttatgtccatgtgtattcaatgtgtatctcccacttataagtgagaacacatggtatttggttttctgttcctctagctttcaaattaaaataacttattttattttttttgaaacagagtcttgctctgtcacccaggctggagtgcagtggcatgatctcggctcactgcaagctccgcctcccgggttcacgccattctcctgcctcagcctcccgagtagctgggactataggcgcccgccaccacgcccagctaatattttgtatttttttagtagagatggggtttcactgtgttagccaggatggtctggatctcctgaccttgtgatccgcccgccttggcctcccaaagtgctcggattacaggcgtgagccacggcgcctggcctaaaataacttataataaacacttgcttcaagcaggaggtcatgtaaatagatataacacacacatgttttttaaaagttacacagtcattttgttggaaaacatggaagacatagaaatttttcagactgcctaactgctcaatgggttcaccttacccaatttgtaactgcccagtgggttcaccttacctgctgcctagacagagccgatttctctagacaggggaatggcaatagagaaacagtaattatcacagaaccggctgagcaggagactggagttttattattactcaagccagtctccctgaacatttggggatcaaggttttaaaaaacaatttggtgggaggggaggggcagtgagctggggagtgctgattggttgggtcgaaggtgaaatcatgggtcgtccctgtcttcttgcactgagtcagttcctgggtgcgggggggtgtgggggtggggggcagtcacaagatcagatgggctggtttctcaatctgggtggtgccggttgatccatcaagggtagagtctggaaaccatctcaagtcctgactgtaggagcagtttagggagggccagaatcttgtagtctccagctacatgactcctaaagcataacttataatcttgtggttaatgttagtagtctagtccccaggcaagaaggaaattttttctggaaaagagctactatcatctttgttttaaacttttaaaactataaactaagtttctcccaacgttagttcagcctaaacccaggaatgaacaaggacagcttggaggttagaggcaagatggagtcgtttaaattggacctctttcactgtctcagtcataattttgcaaaggcggtttcggcttgggaagtgagaaaagtaagtctcgaagtatgcaggatatgatcccaaaatggttgaaaggaataaaaaagacaatacatgtttgcttagttttgttgctgctataacagaatatcacagactaggcatctatcaatggaagaatttatttggctcatggttctgaaggctgggaagtacaagaacatggcactctgatgagggtcaaaccaggtggaagggtggaaggcataaatgagcacataagacagacaggaaaagggggctgaattcccttgataagtgttaaatacagtgagttctaaatttcccgtcaaagaatcagtatgtcagtatgttcagttctttgttctccattttaaagtttaactttctcattctccttgcccctagtttcagtaaacaaccttttccaccatttctaatcagtagttcacatctatttcctggtcaccgcttcgatctgagtcacccctggtcacctgctctgacctgagtcacctgttcctaactgttcttcccatcaaactattcaccccaccactctgactcatacccctgctctctttaaaatagccaatcggaattagcttagactgtgtgatccaaccctagccaataggggaacaacacagcagcaggggttacctgcgtcaggaataaaaaccccttcccctctcttgttcagctgtgctctcaccattgctccatctgcaagtcacactcttctacagaagtaaaattgccttgctgagaaaattaaatttatgtttgagtgctatttcttttgcggcactgaaaatttatttctaacataagtaacccacttggtgataacagcactaatccactgatgagggcacggccctcatgatctaatcacctcttaaaggtctcacctcttaagaccatcataatggcaatcaaatgtcaatgtgagttttggcagagacattcaaaccacagcacatgtagacacgctatatgcattcatagaaaaaaaactggaaagatacacccaaactgttagtagtcatgatttgtaggaagtgaatttttattttgtttattgttctttatggtaccatttttctacagtaaattgattattttttaaaatcagaaataaccttcaataagtttttttaaaaaagataatatatgagctagatctttacctcaagaatttcgaaaaataaattatagttacactaatacaaccatggcattcaaggtgggctctctctctctcacacacacacacacgtagacacacacacacacactcacactcacgtaaatatactcacatgaacataaatacctaaagctatacataaagctctataggaacatttctggggggttatatggctatgtgtttattgatttcttgagacaaaactgctctgggcatctcagggaagttttctctttcttagcttgaagcaaccaggtatcacatttctgggttttaaaagagattatattcaaggatgctctattactttgaataggcgaaacattccaggctgatgggaattcatacctgtcaacagctgtgaattagcatttcaaaccccttctaatgtgacttatgaactttatcggtatgaggattcaacaccttgtagaaaagcaagtgctgaatgcaaaccagggtgaaaatgctttctgctagggagtagaagcctaaaggaatgatcaagatccatctgccaagaacaacttcacaggtggataggtgcaaaacgaccatgccaggaatgaggaaaatagacaatactttagatttctttcctttctttcctttccttcctttctttctccccttccccttcctcccttccttccccttccttccttccccttccttccttctttctttcttgagatggagtctcactctgtgtcccaggctggagtgcagtggcacgatctcagctcactgcaacctccgcttcccaggttaaagcaattctcctgcctcagcctcccgagttgctgggactgcaggcgcccgccaacacgtccagctaatttttgtgtttttagtagagatggagtttcaccatattggccaggctggtgtcgaactcctgatcttgtgatccacccacctcggcctcccaaagtgctgggataacaggtgtaagccaccgtgcccagcctactttcaatttctaactgggtatttagaggggtagtaaatatagctagaaaaaaaaagcttcagggtgaaatggtatgtttgatatttactcaccaaggtcttccccttttattatcactttttgttagtttccattcttattcctacaaggccacagccagaagtgggtgcaggagaaatgaagttctgaacatttgaatgaatgcctatttcaattccaatcattccctggaaaatgttaagtttaaagtaaaatggaatgaggtagtcctaacagctcaggaaacaataaaagggaactgagagctttacacgtcagaaaaactctcagacaatgcctaagaggattggaaagaaatttctaaaacatgtcgtccctacaaacacacatgaaaaactatcttgagaattccacaggaaaatatacatccatttaaaaaagaaactttgaagcacaaaaattaaagagaaaaggctttttcccagaatacaaaacactgcttgagttgtggaagaaaaagagctcattagtatttcaaaggaggttgataacttatttcaatgtccatactgggatagaggatgagccaagtagtatactcctcaaaatcctagggaccacttactctcctctgccatctcttattttatttctttttttgagatcgagtctcattctgttgcccaggctacagtgtagtggtgtaatctcagctcactgcaacctccacctcctgggttcaagcga[134 bp omitted]tggcctcccaaagtgctgggattacaggcgtaagccactgtgcccggccagaacctgcgtattaacaagatccccagatactgcgtctgtgctgttctggaggacataccatcccaaatcaaccctgaaggactgaaaagttagtgaagggaaatgcgggatagaaaagagggcaggtattctgggtagaggcgggaatgtgtacaaggccaccaaaataaaggaaagccagggatgccaactgttcagggtggctggatcctagtccatggaagagaaaaagaaagtgtgtattgagaaagggtgcagtgtggccaacggggaaggaagtgaaggaagattcggcctgagactagatcctgctaggctacggaaaccagtgctgaggagtttggactttattctgagggctttggggcacctctgaaggattttttttttttttttttttttgagatggagtctcactcttgtcgcccaggctggagtgcaatggtgtgatcttggctcattgcaacctccgcctcccgggttcaaattattctcttgcctcagcctccagagtagctgggattacaggtgcccgccaccacgcccggctaacttgtgtatttttagtagagatgggttttcaccatg[136 bp omitted]atcccctgaagacacatggtgcttcagctcattccactcctgagtaattccttactcatttcaaactaccaagagtccacccattttgtctgtgctaactcaagtctcttccagtcatggtggctggaactgatctgtttctcaaccctcaactcctgcagcactgtggatggaccactcacatggtctttgtcatggccactccatttctgcagtgagatttttgtctactctcttctactgatacagcatagcttttcaaagaacagtttccaaggaccacctatttcaggatcatctgagggtatttaataaaatcaatttccaaggcccaagaccccctgaatcggtatctctgtgtgtggggcccagatgtttgcattttaaaaaacattccagtcagatgacgtggcttacgcctgtaatcccagcactttgggaggctgaggcgggtggatcacaaggtcaggagatcgagaccatcctggctaacacagtgaaaccctgtctctactaaaaatacaaaaaattagctggttgtggtggcgggtgcctgtaatcccagctactccagaggctgaggcaggagaatggcgtgaacccgggaagcggagcttgcagtgaacagagatcatgccactgcactccagcctggttgacaaagcgagactccgtctcaaaaaaaaaaaaaaaaaaaaattccaggtgaagctcttaaatatgaaagccagagaatcacagtataagactacagcatcctgagacccagagccatcccagaaaccctagaatcagacaccgcacctctgtctacaaccttggcatgcggctgctcagggagacaagtaaacgaagtgttttaaattcctctctctactcattcttgattacataactaatcaaaatgcttccaaaaaccaaccaaccaatcaagaaaactt[142 bp omitted]aaccctgtctctgctaaaaatacaaaaaattagccaggcgtcatggcaggtgcctgtaatcccagctacttgggaggctgaggcaggggaattccttgaacccaggaggtggaggttgcagtgagccgagatcgcgccactgcgccactgtactccagcctgggcgacagagtgagacaccatctaaaaaaaaaaggactcctcattcctgctgtgtactctgtctattggcctatgctcagaaagggctttttctttatgagacaggaatgtgcccggcttctgtcatcacatatataagacagacaagactggaatcaaactttcccacagaattggcgtaaggaccgaaagagacattatgtatctttgaaagcgccatggatactgcttactctgactattattatgaatgctttaagttggtcatttaggagctaagaaacactgatgagattctgtcttgtatgagcatgattgtggtgtttctttctctctcctgctggactttaagcaacttgaaggtaggactctaaggctgacgcaaccgcgggatcctcccatagcacagcattgctgaagggattcaataaaaatgtgatgaatgggtgaaagatgaccatgtcacagaagcccacgtgtaataaatagttcatttggaatgtgcacctgcgtgggaattctccaaacacctgccgaggccagtaactcctgttttctcagcctatcaaagagggcagctgctcctttccctcaggtgaccttctctcatttatcaaagctggaaagggctgtgattttccccaacatgcagactctctgagcaattaatagccctctcaaacagacttgtcctctaatgtcgatctgggaaaatgccatttaaaaatttgtttcactgaacattttcacaaaatgaaaattagaagatattaaaggcatctggctatgttaagtaacgggaatttatagtacttaaatttatctgcaaaaggaaaacatgataaacactagcatggttttctatcatttaaatcctaaattcacaggatggaacattcaactcctgattttccagaaaatctactcttatgaatcctaaagttatcttgaaaggcaggctttgtatttttccagtgaatatattgctgtttcttatcaatgttgcacttgatttttttttttttttttttttttttgagatggagttttgctcttgttgcccaggctggagtgcaatggcgtaatctgggctgaccgcaacctctgcctcccgggttcaagcgattctcctgcctcagcgtcctgagtagctgggatgacaggcatgtgcgactatgcctggctaattttgtatttttagtagagacggggtttctccatgttggttaggctggtctcaaactcccgacctcaggtgatctgcctgcctcggcctctcaaagtgctgggattacaggcgtgggccaccgcacccagctgaaatgatttttaaattgtaaaatttaaattataaattataaattatatatataaatatatattatatatataaattataaattgtaaaatttaaaattgtaaattataagggactcttttctctagtagataccacctttaaagtatcatgtggaaagtcgaaattaagcaatttcacatggaaatggaggttttggcttgccttgaaaaatcagaagagactgcgatattgggcccacattgctacctggcaacaatcacctggggctgacctcttgagagggatgctctctggttttgcttctctactgcagcctcactcctttctatgcccgcctggcctccacaatgaataaagagaaggaggcatggcttctcttccaaagatacatatattcatggatctctaataaacgaaagagtgaaaatacgtaattggcatagagggaaagtagagtagtcgccacaagacatgacttttttgtttgtttgttttttgagacagagtcttgctctgttgccaggctagagtgcaatggcgtgatctcggctcactgcaacctctgtctcctgggttcaagcgattctcctgcctc[134 bp omitted]cggcctcctaaagtgctgggattacaggcatgagccaccgcgcccggccaagacatgactcaagtgcagctgaagcaagatttgaagttgaacagcaactgaggggagcccactgtgtgagcaaatgctgagaagcagaaatggacaagctaggtttgggggagaagaaataactggtttggctatagtgggaggtttccataggggtagaggaacaaggtggcagacgagaccatgtagagagaccgtggagagcctcagatccagagccaaggactgtgggctgtgcactctagggcagccatccccaacctttttggcaccagggaccaggttcacagaagacaatttttccacggcctggaggggaagggggagatggttttcgggatgaaactgtttcatctcagatcatcgggcattagagtctcataagaagcacacaacctacatccctcggatgtgcagttcacaatagggtttgcgctcctatatctaatgctgccactgatctgacaggaggcggagctcaggtggtaatgctcgctcaaccaccgctcacctgctgctgtgcggcccagttcctaaaaggccacagaccggtaccagtcctggcccaggggttggggacccctgctccagagccaggttggagctctccaaggtttacactaacaagggcctggcaagataagagtagtgtttcaggatgatccagtggggggcccttcagagaatggtgacagagaaaatgcaaagggagagccctaagcgtgcaagacatgctatggcctgaggggcagtaggcactggaggaggagaaagagctccacataggaaaggaattgtccagccagagctacgggaagaacagtggtgccaaacacaaataccggtgtgggctggcttcttgtctgggtttcaagtgtgtgtggcgcgtgtgtttatgatagtggggtgaggggttgcaaatgatgaatttggtttaaactttttgagtgccaggaaatg[136 bp omitted]atatggtgaaaccccgtctgtactaaaaatacaaaaattagccaggtgtggtggtacgtgcctgtagtcccagctacttgggaggctgaggcaggagaatcgcctgaacccgggaggcggaggttgc[132 bp omitted]atggagaaggtttctaagaaaaacatgccccaagaggatctggaccacaaaacccagaaatgcttctgctccagttcaagaagcagtggagatgtgattcttcgatacgtagccttagaaaccaaaccacactgttgccccgggtactctcaaccactccaagtttttatagagcctttggaatgatggatggggctcagtttacccagagacagtaaaatcagatgaaaggggttaattagaactgttctctctactgctaggtgcaaaacagccacattggagccatgatgaagctacgtctatttaaacagccaaactgatcattgtaactgttttctctcttaaaataaaccccatgcttttagccatattcctgcttcttaaagcctctcatgtgaaagatgccaaaataatcctggaccttaaagaggtcttgatttatcatttcacagctggttcccatgcacctccctttccactttttcagagcctcactatataaatcctgccatcagatcagggaggcaggcatggtggtgatggatgtcaaacctgcgatggggaaagtgaagagcagttccctactgggaacagataagccagcagacttctcacagactgctcctgttaccaactcagccaaccccaccccctcctcctgctcccttggccctccccatctgccggatagggcctcccttctgctgcgaagcttccactcctgtagtgttctggtttgcgttctttgatgagaaatattaattccaggttaatactgatgttaaaaaataaaagcccgacctaattaaaaattcaagttaattttcacccaggttcccttaacttttaaaaaatgttctttttgtaaaaaagagtaaataggttacatgaggaggcccaagtaccaggaattgattagtggcacaatgaaaaaagttacaaaatataacaacaaccacttaaagcaaagttaatctagtttgctcaacagcccaggacttttgctgcctaagtacaggatgcttccttgcatatacttgcaaatttcaccttttaggctaaggagatgtttttcaattgatttgggaaggaggaaggggtcaagaccacggaggctccaggtaaaatgctgtaggtgggcagtctgcctctgatactaaacttttttttttttttttttttgagatagagtctcgctctgttgcccaggctgtcatgcaatgtcgtgatcttgtctcactgcaacctctgcttcctgggttcaagcaattcgcctgcctcagcctcccgagtagttgggattacaggcgtccgccaccacacccagctaatttttgtatttttagtagagacggggtttcgccatgttggtcaggctggtctcaaactcctgacctcaggtgatctgctcacctcagcctcccaaagtgctgggattacaggcatgagccaccaaacctcttcctttctttgctctcttcccatcacccagccctcctctgttcagtgcccaggcacactgagaccccacactgctgtctctggcctgcaaagatgcacaatgccacctcatgtaggcctgcttgcctgccccacccacacccccaactcaggtcataacatcactttcccatcaaagctccagtttccctactatggatgatttcctggtgatatttttaaaatcaaactaagcgactctaaaaggtgaataacaaactcattgacttcccactgtctcacacacaacacacccagcctttgcatctggtttagtgacttgttagcttacatccttggtcataacttggcagccagggagccaagtctgatttgcagttgtgttttaacctggtcagtgttttaaaaatcggcaaagtttacacaaaatcatcgctctctctctttctctctcaggagacaggtgatatggcatcctggggccacagttccacagggtagcagacgaggggctgaagagcaagttctctgtgggctctagttcacagggacacctgccactcctgactgtcatatacacacagctctcattttctttcttttttttttttagatggagttttgctcttgtcacccaggctggagtgccacggtgcaatctcagctcactgaaacctctgctccaggtttcaagtgattcttctgcctcagccttctcagtagctgggattacaagcatgcgccaccacacccggctaatttttgtatttttattagagacagggtttc[132 bp omitted]atttgaatttgtgacttctggcttaaatgactctctaaatgagagcacaattaaataatttcacagaagtagggacaaagatatatttttaaaattttttatttttagatgacaaagaatatatatttatggggtacaaagtaatgttttagtatctacacacattgtggaatgattatatcaagttagttaacatatcccttatctcacatactttttttttttttttgtagtgacaacatttaaaatttgttctttcagctactttgaaatacagttgagtatcccttatccaaaatgcttgagaccagaaatgtttcgaactttggatattggaatatttgcattatacctccgggttatgcattccttttttttttttttttttttgagatggagtttcactcttgttgcccagactggagtgcagtggcacggtctcagctcactgctacctccgcgtcctgggttcaagtgattctcctgcctcagcctcctgagtagctggaattacaggcacacgccaccacacccggctcatttttgtatttttagtacagatggggtttcaccatg[137 bp omitted]aggaaagcagatcctatacagtaacacagagggcattttcaacaggagatatctgttgctttgcctttcagtatcactcttggctccttttcctcctctctcaacttttatatttcctctctttcatctctctgtctatccctccccatttctctttccttgactaaaccaaatattaccacgggagcacacatcttacagcactctgcctgtccatcccacttaacctcaatcctcagcactctggtgtgtcatggaaaattaagaatgtttgagaagtaccacggaaagaaaaagtttagcaagcaatgaccacaaaccactaaccctggtcacatctggtcactgttcttgacaaaactcaaaaactttatccaacactcaatggggggccccctctagcttatgcatgcaggtctgagggttgatttcacatgcatccaaataaagtattttaggaaaaagaaaacaaactcacaagccaggaggccaggaagcaaagagactccctagagcttctaacttgctgactggccacagtgacaccataggggtggctacactgaatctggtctgatgttcttaccagttttatggctgtaccagttttatgacagtgacatgaagagatatactcaaagaaatgcctctccttgctgggcacggtggctcccacctgtaatcccagcactctgggaggccgaggtgggcagatcacctgaggttgggagttcgagaccaacctgatcaacatggagaaaccccgtctctactaaaaatatacaactagctgggcgtggtagtgggtgcctctaatcccagttactcgggaggctgaggcaggagaatcgcttaaacccaggaggcagaggttgcagtgagctgagatcacaccattgtgctccacagcctgggcaacaagagagaaactccatctcaaaaaaataaaaaaataaaaaaaaaaaaagaaatgcctctccttttcagcaccttcagaagttagatgtatccccaacatctcctagttcactttaataacccattgccactctacataaaactgttttgaatcttttacaccaggaagccctcagccttcccaaattgcctgggctgctcaataccataaagctcctagagaaatgactctttatgaaaagtagtacttgtttctaatggagcagctatatatggaagcttttttcctttttaaaaataaattgtaaaatacataacaaaaatgaccattttaacaaaagtataaattcattggcaaaatacactcccaatgttgtgcaactatcactactacttattccagaactttctttttcttttttttgagacagggtctcactctgttccccagactggagtgcagtggcacgacgtcagctcattgcaaaactctgcctcccaggttcaagcgattctcctgcctcagcctcccaagtagctgggattacaggcacctgccaccatgcccagctaatttttgtatttttagtagaaactgggtttcactatgttggccaggctgattctagaacttttcatcagcccaaaaggaaacctcatacccattaagcagtctctctccatttctcccaactccccagtccctggcaatcactgatcagctttctgtctctatagatttgcctactctggacatttatataaattaaatcatataatatatagctttttgtttctggcttctttcacttggcataatgtttcaaggttcatttatattttagcatggattactacttcattccttttttgtggttgagtaatattccattgtatggtgtgtgtgaaggcttttgtgaaataaataatggtggttggatagtatgtaactgcaagctactaaactgaaggaatttatcctgtgtgacaggtggtatttcttttacatatgaacattgtagaatatgggaacctgctgggcgcggtggctcacacctgtaatcccagcactttgggaagccgaggtgggcagatcacaaggtcaggagatcgagaccatcctgacgttgaaaccccatctctactaaaaatacaaaaaattagccaggcgtggtgcggacgcctgtaatcccagctactcagaaggctgaggcaggagaatggcatgaatctgggaggcagaact[132 bp omitted]actttctatccctattcaaatttcatctttccagactgagaagtcctttaaaaaaatttgaaggctcagaaaatcctcatccacattatttcagttgcctttcaatgaatccaattcaaaggcagtcatttgtgctagttgctgggaatcagaattgcaagacacagtccctgcactcaggaagctcaaggtctagtgagaagataaacatccgaacaatttcaccacactgtgataactttcaggatgtaaatctaaactgtaaggactcaagttcacgaagttttccagctgagggagcttatgcaagcttaatatgtgggtcagaaatgctttggtttggcttcctaccttcctgatggccaaggtcttcagagaaaagcttatacattaatcgtcccttatgcatggaggacgcgttccaagacccccaagggatgcctgaaaccagggacaggactgactctacaaatactatcttttttcctatacatacatacctacgataaagttaactttttgagatggagttttgctcttgttgcccaggctggagtgtaatggcacaatctcggctcactgcaacctctgccttccgggttcaagtgattctcctgcctcagcctcccgagtagctgggattataggcgtccacttccatacccagctaatttttatatttttagtagggacagcatttcaccatgttggccaggccggtctcaaactcctgaccttgggtgatctgcctacctcggcctgctaaagtgcttagattacagacataaggtaagccactgcacccggccgataaatttattttcttttctttttttttttttttttttttgaaacagagttttgctcttgttgtccaggctagagtgcagtggcgcaatctcgcctcactgtaacctccgcctcctgggttcaagtgattctcctgcctcagtctcctgagtagctggaattagaagtgcccaccactacgcctggctaattttttgtatttttagtagagatggagttttaccatgttggccaggctggtctcgaactcctcacttaaggcgatccacccgccttggcctcccaaagtgctgggattacaggcattagccaccacgccgggctgataaagttaatttctaagttaggcacagtaagagattaacaaccataactaataataaaatagaacaattataacaatataccgtaataaaagttatgtgaatgtggtctctctctctctctctctctcaacagatctgactgtactgtactcctcctccttcttgtgataatgtgagaggatgaaataaatgcctacgggatgagaggaagtgatcctcctgcctcagcctccctggtagctggaactactggcatgcaccaccacaccgggctagtttttaaatttttcttttgtagagatggggtctgactatgttgaccagactggccctcaaactcctggcctgaagcaatcctcacactttggcttcccaaagtgcggggattacaggcgtgattgtcccaaatgtcagcagtgtgacactgcgttaggctactattgacctcctggcaatatgtcagaagcaagatcatctggttcgagtaatcctgaatcactgagccctgatgatggccatagctggatgtgaggagcagatcatggtaatgactaatgaatgggccgcgtatacagcgtggatacgctggacaaggggatgattcatatccagggtgggatggggtgggatggcgtgagatttcatcacacttctcagaacagcatgcaatttaaaacttatgaattgtttacttctggaattttccatttaatattttaggattgactgtggttgaccacaggtaactgaaactgtggaaagcaagaccaagggggaactactgtaatgagagcagttggtgttgctttcctgagtagctgggctcttctgattgaccctagaagttagcatctatcatatttgcctaatgcgacatcttgctcacactaaagtgtttttttttttgtttttgtttttgttttctttttttgagacggagtctctgttgcccaggctggagtgcagtggcacgatctcggctcactgcaacctctgcctcccaggttcaagtgattctcctgcctcatcctcctgagtacctgggattacaggtgcccgccaccacacctggctaatttttgtatttttagtagagacagggcttcaccat[138 bp omitted]atgagatataaaagtgctgattagtagcagacctagaaagaaatttcatcaggcattccttcactccttagacatattaaaaatattaacatgggaactaaggcactaacccatgggcagcttcatcgtctatactttccatctttctctccaactgtttatgttgaaagatttcaacctgacagaaaagccgaaaagatagtataatgaacatctatataggccaatgttaaatggtgaataatgaatgtttttaatgtggttatatgtaataatgtcataataatgtagtgatttccttgtctttttttttttttttttttttttgagacggagtctcacactgtcacccaggctggattgcaatctctgcctcccaggttcaggtgtttctcctgcctcagcctcccaagtagctgggattacaggcgcgcaccaccacacctggctaattttttgtatttttagtagagacagg[135 bp omitted]ctcctaagaacaagaatattctccaacagaatcatatcattgttaatctgaagaattttaacactgatacaacattatctaatgcacagtccatattcaaatgtccctcatttactcaataatgtccttctagctgggtatgtttttaaaatctggaatccgatcaaaatcagaaactgtatttagttgtcatatttctttagtttcctttaatctacaattcttctatcctttttctatccttcatgaccctgatattttccttgtctcacagaacacccatcaatctgaactactcttatagtgtctgttgatgtcattcaagttaacatttttggcataaatacagtaggtgatgttgtgttaattataccgcatcaaatttggagcagtgtactgtgtcctgtaatcctagcgctttgggaggccgacttgggaggatcacttgagctcaggatttcaagaccagcctgggcaacatggtgagacccccatctctacaaaaaatacaaaaaattagctgggtacggtggtgtgcgcctatagtcccagctacttgggaggctgaggcaggaggattgtttgagcctggaagatggagggcttcggtgagctacgattgtgccactgcactccagcctgggtgacagagcaagatcctgcctaaaaaaaaaaaaaaagaaaaacaacaaaaaaaaacttggggcttcataatccaggttgtcatactcctggtgatgctaagtttgatcacttttttcaagtgtctttcctccttaataattaataaataatctgtgtggtgatactttcagactgtggttatcctgcttcccatatcttttcacccaatagttttggcattgatggtcaatcctgaaacaattactggtggttgcaaaagctgtttttctaattttatcttttttttttaatatatcttagctgggagaaagagcctctccccatccttactcccactttttttttttttttttttgagacggagtcttgctctgtggcccaggcgggagtgcagtggcgcaatctcggctcactgcaagctccgcctcccgggttcacgccattctcctgcctcagcctcccgggttcacgccattctcctgcctcagcctcccgagtagctgggactacaggcgcccgccatcac[155 bp omitted]actcatggatgcatttttcaagttcagtatctataatccattaacattgttattctttttattgctccaattgcctccattttttttttcagactcttttttcagggtcttactctgttgcccaggcaacagtgcagtggtgtgatcaaagctcactgcagcctttaactcctgggctcaagtgatcctcctgcctcagcctccctggtagctgggactactggcatgcaccaccacaccaggctagtttttaaatttttctttggtagagacggggtctgactatgttgaccgtcagactggccttaaactcctggcctgaagcaatcctcacactttggcttcccaaagtgctgggattacaggcatgactgccccaaatgtgacctgtgggagtccctataagtcagctcctgtgttcttttacatagccccatcattgtttgtgcgcttccttgatctcagacccaagatgttctaggcttgccttttatcttcctgtcccagatttagactcagttgctcctgcaaagagtcttagtttcttttgggagtgaatagtatttagaaaccaagaactgggtgtaaactgtgctcattactacaggagtatcactgcttctacatgctttcagtggttaaagtgggcaatgtatttatttacttaaagtagcagcccaccatgatacttccaattcaaaccaaacaccataaagatcattattacttttctcattcacattcactatttatctccctagttcccaataacatcaatatatttactcacttactctccccaactaatacacaaagcagatccagaattactctaatatcactctaaacaataaatctacttagtagaattcaagatttctgcaattcaatgtccttaaaaatatccaactaagggtgcgtaaagtatatttaagtcacttacattcttctttactgaatacattctctgtattttaaattaacagatttttctttcctatttgtaagtttatttctcaagatataacagaacctacaaatgtaaagagcttcaaaattttaacaactattttatcaaaatgattaatgtataagctaaaaagtcaagtaatcctaaaaaaaggttataataaaaaccagtgatttctacctgctccttctgactttcctcctcatcaaaagcactcacttttcacttattttggctgtttcttctgttacttatctccacacttttaaactatatgcccataccataatctttaaattccatcaattttaaatattacacagtcaccttctctttcattataggagtatttagctctcttgtactccacctcttcaatctcccatctaccctatagttgaatcatatattttgattaaatcaaacatctaacaattacgttatcatggctatgtttgtatttactcttaacatactataatcatgcttccatttctgtattactttttgttttcctggaattaataattgtctcactttttttttttttttttttttgagatggagtctcactctgtcacccaggctggagtgcggtggtgagatctcggctcactgcaaccttcaccttctgggttcaagtgattctcctgcctc[211 bp omitted]cttccatttctgtattactttttgttttcctgggattaataattgcctctctttttcaattgcttgaaatccctcctactaaatctcataaccttcagcaatcactcagtgtaatttttcacgcaggaaaacataccatctattttccctcttagctctagctctctattctagaacagctgttctcttggtctgttgtgcagccttccactgctgtcatcctgggagttgtctttacttctctcccttgtttctgtcctcccagatcttctttctagggttaatatttgtcagtagcttcctgcaatactaccacccctgtttttgctgagatattggatgccattctaagttcagatcctttgaaagtaatctgttgtcccctacctcccacccctagggaggcagaaacttctctttaactgggtgctctgaaatttcattatgttgtgatttgacatgggtctttttttatttcatttcttaagctggatattgataatggactctttcaataaatatggttactcctgtctgtcagttcttgggaaatttctggcattatttcctttggtaatttgttgactgttgttttctcattgtggcattcctactctttcgatcttggatggatcctctaattttgatatcttcctgtgtcttttggttctactttgtggaacttttttttttttttttttttgagacatggtctcaccctgtcacccaggctggaatgcagtggcacaatcacagctcactgcagccttgacctcctgggctcaagcaatctcctctcgcctgtctcctgaatagctgggactacaggcatgcaccaccacacctagcaattttttttttttttttttttgagacggagtctcattctgtcgcccaggctggagtgcaatggcgcaatctcggctcactgcaacctccgcctcccgagttcaagcgattctcctgcctcagcctctcgcctcccgagtagctgggattacaggcgcgctccaccactcctggctaatttttgtatttttagtagagatgggatttcacca[136 bp omitted]tcgctattttgactaggctggtcttgaactcctggggtctagcaatccgctcacttcagccctccaaagtgctgggattacaggcaaaagccaccaggcccagcccatctcttcaactttgaaactgccaggagtgaccactgatccttcccattcattgctttttttcacagaccacctctcagttccttcttttacagagagaaagaaaggaagtagctgagggatgtaagccaacttaactagaagacattaagttcagttgttctacatttgttcacatctaaaattacttaatatgtaggtggtaggtccatttgtcaagcagtagaaatagcatcgttccttccagtagctcagtgtgacaatactgtttcttctattaaaacaatgtctgcattttggggtttgcagaaattcactgtttggcatgactttaagaatagctctaaccaaatggtccatgagaatacataaaaacctttttcagttcaacaggtccacgaagaacccaataattctgaaagaaacatcgaaggctggaaaaacatgtcagatgattgtcaggagaatatatgttgcacatctcagtggtgcccatgtaagctgcctatatgccaggtatgacctggtgtctgccagctccacacctgcccttctctgctcagtcatgctggggcttggagtctgtgaactacccttcccaggctcccctgccagctggcttcctgttatgttctgccaaaataaggcactgtcaggagttcagaaagcaagaagaggggtgaggctgttcctcttcctctctttccccatctgcttctggcagcatctctgcaagtgtctgtattctaacagtgttccccatggcagtggcagcctctctttggcagtcccagaacgagcaaggcaggcctgcttctgctgcagcccaggggccaggtcctaggcatctctagcactggctgagcggcaatcccaggagtactgtggtgtgcagcagcgcatttgcatctttgctctcctaggcttaagggtggcagctgcttcacacaaggactaatttctggattactgcaccttccccttttcattctctccatccttttaacagttttttttttttttttttttttttttaggcaaagtcttgctctgtcaccccggctgaagtgcagtggcatgatctcaactcactgcaacctccgcctcccaggttcaagcaattctcctgcctcagcctcctgagtagctgggattacaggcatgtgccaccatgcctggctaatttttgtatttttagagacggggtttcgccatgttggccaggctggcggtctcaaactcctgatctcaggtgatctgcctgccttggcctccccaaatgttgggattataggcgtgagccactgcgcccggcccttctaacagtattctaacaagttgtttgcattctgtctcctctgagtgaaatacctagtatggttattctttttcctgattggctcccaactgacgga[139 bp omitted]tggttttgtagaaaactccatctctacaaaaaatacaaaaagtagctgagtatggtggtgtgcacctgtagtcccagctacttagggggctgaagccagaggatctcttgtgcccaggaggttgaggctgcagggagctgtgatcatgtcatttcattccagctggacaacagagtgagactctgtctcaaaaaaataaaataaaataaaatataaaaaattaaaatttttaaatactccagaagtcttaattttcagaaagagtgaagggcgcaatgcctcatctatggttatgattgcaaaagtacaaactgatttcaattgttttattgacaaagtcatacatctctagaagatgacagtttctctaatgtgaagtcccaaattcaagaggatttccattagtttccagaataagtagctaagtgcacaacagccctctctgtaaagtttgactgctacaaaaataagaaaactggtttgcatgctgctaagatgaccgaacacaaaaacatcttttaataaggagctgaaaccaagttgggagaaggctgcttcagtcttcaatttttaggtgcagtggctcacacctgtaaatcccagcacttcaggaggccaaggtagatcgtttgaaaccaggagttcaagacaagcctaggtaagaaagcgagacttcatctctaccaaaaaaacaaacaaaaaaattagctgggcatggtggtgcacacctgtagtttcagctacaggggacgaactccagggctcaagtgatcctcctgatagcttagcacagaggtatgaccatgccactgcactccagcctgggcaactgagcgagaccctgtctctaaacagaagggaaaaaaaggtcttcaattttgcaaaagggcagccatggtacaccactcagttgttcattcacggtcttcaacccactttaaaaggcataatggaaatgacaagaaaacagatacaaaaggtatttttaagaggatgcggcagaatgtatcataaagttattacacagtaacagtttttaaatgcacttcttgggactattcctgtgctccgttatcttctaaacacacttccagatggccccatgttcggtgacacattgaggagagaaagcggctggtgaggccacacaaaagaaaccggaggatggcagggtgctaggaatgctggctgaagggtgggatgcagcttgggcatgaggcctttaaaaggcatattcttgaccaagatgataaatagagaggacagtaattaagggaggaagactggaactgagagaaaacaggaaaggagagagtagggggaaaagattacaaagagagaagtgaggatgagtacaggaaactccgggagcacccaataccccagggcaggagatgtgatttaaggatgggaacattatggctgtatttgattggcttacatgtaatagtccccagccccttgggggtcaccagtgctacagggaaacctgggtgggattatatccagcatcctctcagtggaactaaggcttttttttttctttttttttttgagatggagttttgctcttgttgcccaggctggagtgcaatggcgcaatcttggctcactgcaacctccatctcccgggttcaagagatccttctgcctcagcctcccaaatagctgggattacaggcgcctgccaccacgcctggctaatttttgtaattttagtagagatggggtttcaacatgttggccaggctggtattgaactcctgacctcaggtggaactaaggctcttgagcctgactttgggcgttaatacgcaggaaaagaggtattactctctgtggaagttatcaccttcaagataaacacactggccctgggaagaaaggttgaatagagagcctgaaatccccaaagagaaatcccttgaagggctcctctgaactcccatcacccacaaacttaagagttttcctggtattccacaatgctgagacatattttttttttttttttttttttgggacagagtcttgctctgtcgcccaggctggagtgcagtggtgcaatctcggctcactgcaagctccgcctcccacgttcatgccattctcccgcctcagcctcccaaatagctgggactacaagcgccgaccaccatgcccggctaatatttttgtatttttagtagagacagggtttcaccgtgttagccaggatggtctcgatctcctgagctcgtgatccgcccgccttggcctcccgaagtgctgggattacaggtgtgagccaccgtgcctggactgtgataggagttttaattttctctggttaatgaaatttcagggaagggatcaaaggtgattttatttctctttggtgggtcctgtttccaggcagataagggagcttcagagaagagcctcattctgtgctttgggagggacagaggattgagggacaggagtggggagaaggttaaagagcccctgaggtgtctttagttccgcgtgtcaaagggccattttttgaggtattgtttcctgagcctgacatacggaacaggatggcacaatattttgaagatgccaaggaattttgaaattacactattttaaccttgccataatttaatggaaagggggaacaccaagtatttcttcattttttaaattaaaaactttctattgtgggcaaaatacatataatgtaaaattaaccgtcttttttttttttttttttttttttgagtcagagtctcactcttgtagcccaggctggagtgcagtggtgccatcgcagctcactgcaacctctgcctcccgggttcaagcgattctcctgcctcagcctcccgagtagctgggattacagtcgtgcaccaccacgcccagctcatttttgttatttttagtagagatgaggtttc[131 bp omitted]tctgttttccttccagataagttataccagccaaaatatcaacaaaatggtgaaaaatcttaattccctgtctgcaagaaaaaaaatatttattagtgttaaaaaaaaaaaaaaaaagactgtagaaatccaaaagtcattttgaaagcaacgaccgttttaagggccaaaagagaaatacgggctgtttcgagcgtgaatcaaagtgtcaaagaacatttggaggctgctcggtagacatgcactctctcaaggacaactgagatgcatgcctgactgagtcacggctgagcacccagcgctcagcagtcagctccagagctgcagaaagtaacccagtgagacccgcggtgccggctacaggtccctgacagctgatacccaacttcaatacaaagatcaatttgctgctagtccagagaaattgaccttcgtgttcagactcatgggcagaaaaagtcaacagtgatttaaaaatgaaccccaaatcaattattctaaggaatttaacgctggttcaatgactgaaaattgtcattgcctggctctgaaatagaaaggaaaggtgagccaaaaaataaataccgagtcattggtaaggttctgttggagtcaattaatggatccctagagctgattaaagaaaaaaaaattattaatgcaacatctggagttaagttatttaaaagctaataccagggcttatgccactgaatttccaagggacttggcaaaggagaattatctatttattttctaaataccacagattcctttaaattacccaacctctcttgcttcattcaaacatgtgcagcttcaagtgggcgtctactgcattagattagataagtcacaagggcagagtctctggactgcaggcgttgctttgcagttgagctgctctcttcacatgggtaccaccataatgtatgctccagggtgaagagcagcaggagtagggatttactcacggacagaacaatcaatgtggccaacagagatgctttgtacagaattactaattagtgcagcaaggtattaattattataatttctaaaaatattacaattccatctttaattttgtttagttccattcaacttttaacagtgattgtttcttgtaagcaacgttagatgtcacaactaacatgaaagcaaaactgtgtctcattctctgagcacgcaccaataactggcaggagctggatgcctcttaaacagagtggcaagcaccagaaagtcaggaaggtaatctgatatttgaatttccatttagacaatatccaaagaagataatccatgtgtgattaactgtgactttaataaccctacaaaccacgcacgcctccatttgattcattttatagttacagttttaaagaaaggaaaggcatcaaatctgtacccaaaacatcaattttagggaacttattcaaaaaatttaaagtgtctaccagctcacttttaaacatgtaactaggctggacgcagtggctcatgcctgtaatcccagcaccttgggaggctg[134 bp omitted]aagcataagaatcgcttgaaccagggaggcggaggttgcagtgagatcgtaccactgtactcgggcctgcatgacagtgtgagactctgtctcaacaaacaaacaaacatgtaattaaaaacagccctagagctataatgccaacttgggagaaaaacataaggaatctctatctaccaattacttttgaacacagaacccagaagtaaagattctctgtaattctattcctttattttcctgccctaatacatactaaaacctgccaaatcttctccttatcttccattaaaaattctctctctggctgggcgcggtggctcacacctataatcccagtactttgggaggccgaggtgggcgtatcacgaggacaggagtctaagaccagactggctaacatggtgaaaccccgtctctactaaacaaaacacaaaaaagttagccaggcgtggtggcgggcgcctgtagtcccagctactagggaggttgaggcaggagaatggcgtgaactcaggaggcggagcttgcagtgagctgagattgtgccactgcactccagcctggagcctgggcgacagagtgagactccgtctcaaaaaaaaaaaaaaataaataaataaataaataaataatctctttcttgttttgttccaatgagaaaaactatatatgtttgaaaaaaaaattcaaataataaaaacacactgaaggtaaaagtctctattcaggtatgatttaactctgcatgtatttaacttgatgcggccaccctgtatgataggagaggatcagcaaaggtcttgcctattcccctagctcataactgatttagtgtgagtgcacgtgtgtatacagtgtggtggttaattctcttcaaaggagtatggaaagaggatgacagagttggatggaacctcaaagaccatccagtggcaaaatacatataatgtaaaattaaccatctgaggccagggatcattgattttacatgtgaaaagacataaagtgattttgcctcttctctcccgacccaggcttagccagctttggtaaattcagtcccaactagaatccaattcttcatttcatttcaatttacggatataaaagaaaaatctatatataaatagtgagcacttgagtgtaatgagaactgatgagttaggctgggttcacaaaatatattcagcaggtattgggattctatttctcccataagtaggtagacaaatagtgtcgggaaagcatactttgagtatgcaaaactaagtctgtcccaggacaactgactgtacttctaaacccagccctcatttgctggtcccagcaggtgggtgaaaacagatgaattaattggtaagcaaacactaccagaaaacgcgtacaaacatgtacacgtacatcagtcatatcatcaatcaaggcccacacggtgtaattattactcaataagaacagaaaccactcttagaaatcataccttatctttccaaaccacaccaagcaaaaacaataatcaaaaaaagattctactctgtgatcatttctgaccccttgatgattgcaaaaatcactgccttctaacagattacaaagagtgtggaggtctctgaggtggtcacggtgatagctctgagcctgtcagtccctatcaaccaccttctattataaataaaggttttccaattttgcacttctctcaaaggcttcaatttgcctggattaagctgaagcgtcaacgtttgaacttactgctcctattcccactccccaaataaatgctgttagcagaaaaacaggcttttccacagtaggaactcaaaatcaaagcagacaacattgatgtggtcacatataaacgatattctgaccacaaacacttaacacgcgcattatccaaaccccatgagcaatcgcagggtacaggatagagtgaatctttcagggcaccaagagaaagaaaggtcagcgagtcatacattttagctcctgaaatgaatatccagcaatgccaatatattcatcaaagtgccacagtattctcttagattacagaagcaggtctcctaagagctttatactataccatttcactacttagtatatattatcttcatgatggagaagtcatttattgaaaatactccaggtatgtctggggaggggaacagtttaaactgattgaagaagacatgtttaaaaataataataagaacaacttaagaagagggacctgccttatttatctttgtaataatgatagctaggtagatatttgctatgttattattattgttgtttatatttttttttgagacagttttttgctcttgttgcccaggctggagggcagcggcgcgatcttggctcactgcaacctctgcctcctgggttcaagcgattctcctgcctcagcctcctgagtagctgggattacaggtgcccaccaccacgctcagctaattttttttgtatttttagtagagatggggttccaccatggtggccaggctggtctcaaactcttgacctcaggtgatccacccgcctcggcctcccaaagagctgagattacaggcatgagctaccgcgcctggccggtatttgatatattattatactataaccctctgggggttgcagtttatataaatatggtcaaagttacagtcttttacatttttctgtactaataaatagatttcattattattttaaatgactacctaattgggacaaagagccagaaataggatgaggagaagagaaagtgatgaggagaagagaaagtgatgaggagaagagaaagtaatgaagagaaaagagagttcagagttagaacaaacaggcctggcgtctgcctagatagatatgagaaagagagatcccaaagtagtatattgtgacatgttttatttggcccacatggtattttttttatgtgaatttattgtcaacattaaaatattgggacatttcacttagagatccagatttcaggcttctcttaaacaaataaacagatgatgtaggaattctcagcttgcattcccacttagtaaaaatctgccgttgacggctctagtttgccactggagataatcccagctgcccacttaatgcaggaaggtttccctgtctggcccttgaaggcatttgaagagatgaaggaagtttggggcctgaaaaaataggaagcatggaagaggaagcttattttgggacaaagaacatgtagacatggaaaaggtgttgcaggcaatcaagagaaactagctagctggtagctaatgaagacacagacttgggattcaagtgaggtttgggtctgagatgtggaactgtgagttacccatgaagttaaattaaaaaagcagatgaagtggtttaaagaaaagttatcaaggaaaagagagcagaggactgagccttaagtattgtcctcaaaagacaggggggccacgtgaggtggctcacgcctgtaatcccagcacttcgggaggccgaggtgggcggaacatgaggttaggagttcgagaccagcctgaccaacagggtgaaaccctgtctctattaaaaatacaaaaaagtagccaggcatggtggtgtgcacctgtaaccccagctactcaggaggctgaggcaggagaatcgtttgaacccaggagatggaggttgcagtgagctgagatcacactattgatctccagcctgggcaacagagcgagactctgtcttggaaaaaaacaaaaacaaaaagagagagagacagaggaagagggaaaaaatgagaggccatggagaacaaaacaatcaccataggttccatgatctggtcccagcctgcctagcttcattttccacgcctctcagcaagcagccttgatcccagccagacaggctatgtcttagagaaacctggtgctgtcaatgccttcttcgaatctatttcccactgcctggaatgctattttctcctctctgcctgtgttacatttttgtttgtttgttttttgaaacagagtctcactttgttccccaggcaggagtgcagtggcatgatctaggctcactgcaacctccgcctcccgggttcaagtgattctcctgcctcagcctcctgggtagctgggactacaggcatgtaccgccatgcctggctaatttgtgtatttttagtagagatggggtttcacaatgttggccaggctggtcttgaactcctgacctcgtgatctgcccaccttggccttccaaagtgctgggattacaagtgtgagccatcgcacccggcctgcgttacatttctattcacctttctcgaatgagctcgggcccacgcttcaccactatgctatatacgtatgtaagaagtctgcacttgcagtctgtaactatatacaaacaaaaatcttttaaaaagccaaaaaataagcccaagagttgccccaaatgcccaagagatgcctgtcacagtgtcccctgcaccactatcacattgctctgagtctgctgccttcccatttgattgagccctccatgaggtcagggaccaggactccttcattttatcctcagtggtgttcaataaatgataacagaaaaaaggaagggaaggaatgagcaactgatgtggcgggataaatcttgacataatgctgggtcacagaagtcaaggaagaagagctatttctgccagagagaaccatctcaaatatgagaagttattccaggagaatgagggctgatgagaagcactggatttcagcaagaatctgccactaataaggttggggtgggggatggtttctgatactttactggaaaataacttggaaatatatatcaaaaggcttaacactgtttgcaccctgaggctgaacaaatctacttgggaaacacatctgtaatggacaatgtgggtttttgttttttttgtttttttttttttggttttgctttttttccctgtccagatccaagttttgtttctgttttgaaggtgctcctgttacatgacctcttggtagggggcggcttctcacttcccattgaggatgtcaaagccaccagattcttcctcagactcccttaagagaggcagaggcacccacgtgttcagcaactctggcctcaccatccagatcacaaccttcttgccaaggacagctgctctgtcctctggccctgcagctgtcacttatctgggcctcaaataaccctccagtcagggccccatggttataaggcagccagagtctgcctctgattctggttcctgggagtatcctaatggaaatcctacctgagagaaaaagatcctaaatatcgaaaaaagtgctatgcatttcatgtagcatgatttacacagcaaaatgtgggaataaactaaggcccccaaaccaggaacacagaagtaaatgatggtattgctacttgataaaatggtactcaccattagaagtaaaatatagcataatgttaaaaaacagaaggtttgttgttgttgttgttgagacacagtcttgctctgtcgcccaggctggagtgcagtggtaggatctcggctcactgcaacctccaccttctgggttcaagcaattctcctgcctcagcctccctaatagctgggattacaggcacctgccattaggcctggctaatttttgtatttttagtacagacggggtttttgccatgttggtcaggctggtctcgaactcctgacttcaggtgatccacctgcctcagcttcccaaagagttgggattataggtgtgagccaccatgcccagccaaaagaaggatttaaaaatacagtattatcataatcttgtaaaaaattacttgcagaaaagatgactgggagtaataaaacattaggcaaataagtatttttccctaaaaattctacttaacttttaaattacaaaagtaatacaggctta[185 bp omitted]gtggggggtgcctgcagtcccagctactcggaaggttgaggcaggagaatggcatgaacccaggaagcatagcttgcactgagccactctactccagcctgggtgacagagcgagactccatctcaaaaacaaacaaacaaacaaaagaaaacattgatgatcccaacacccagccccctgccttacccatgtcctgccattcccacatcaccaatggtgaccacgtgcccctccacacctctcttcagactctaaccaacactgcacatgcaggtctctctcctccttttctttccgtcctccctccctccttttccttaagtgggaccatagtatatatactccctgcttattttggtttggcttttcacttaccaaactcagaagcagcttgtcttactaattcttcagacctctgctcctgtgttgcagcctcttggaaacctctgagcccttggctgactcagacccgtctgtactacctgcagtcattagtgatttacagcatgtgtcccctctctcctatactcttaagtcctatctaccttttaccctttttttttttttttaaagaaacaggatctcatcactgcccaggctgaagtgcagtggcacaatcatagctcaccgcaacgttgaactcctaggttcaagggatcctcccatcccagcctcccaagtagctgggactataggcgtgagccactgtgcccagtcctatctacatttttagctccagttcctagcccagtacctggcacacagatgatatccactatctgtgctggcatggatgaagaagagaacagatgaatgggaaaacttgaggacaagatggttttgaaggcagataggcactgatgaaggacaaggcatttctccattgatactgaattaaggatgacacagcgggtacagagacagacacacaagaatgtaaagaaaaaggggccaagagatttaactagcttacctcaatgaaccatgataagggaaagaagaagtaaaaacaatagccagatagaaatattcttgataaacagcatgataaataaaggaactggcatagttccttctttgttccagattaattgcttattcttgtggtaaaagattaaaaataattctctgagagacaaaagtagctctaaagtctgttaaataaacaagactacttagaactcagtttcttacctatgttttataaggttcaaaagagctaatatgataaaaagcatgttggtcaggcacagtgtcatacatctgtaatcccagcactttgggaggctgaggcaggcagatcgcttgagtccaggagtttgagaccagcctgggcaacatggtgaaatcctgtctataaaaaataaaataaaaattagccaggcatgacggcgagtgcctgtagtcccaggtactcagcaggctcaggtgggaggctcacttaagcctgggaggtggaggttgcagtgagtgccactgcactccagccaggatgacagaccagacagaccctgtaccaaaaaaaaaaaaaaaaaaaaaaaagaaagaaaaaagaaaaaaagcaagccaggtgcggtggctcacacctgtaatcccaacactttgggaggctgaggcaggcaatcacttgaggctggggggttgaggccagcctaagcaacatggtgaaaccccgtctctactaaaaaatactaaaattagccaggcatggtgatacacacctgtaatcccagctaattgggaggctgaggcaggagaatcacttgaactcaggaggcggaggttgcagtgagccgagatcacaccattgcactccagcctgggcgaaagagcaagactccatctcaaaaaacaaaaatgaattaaaccccacatcttatcatagctggcatttataaaggactcactagtactagtcattgtgccacctaactgttctcacttagtctacagaacaatcacatgtactactaattgctatcctccttttagagtgaagggaactgagacttagagagggcaagcagctctctaagtcacccaggctgtaagtggcagatcccaaattgtgccccaggactgtcggacgccacacctgtgctgcatgctactactcttaaccagggtcctgccccacctccctaagaagatcacattcagatgagctgaaggcagatccaatggtcgtcgattgagacagcattaatgcaatgtcagctgggttgatttctaaccacatcactgaaacactactaaaatcacaataaacgtgcttagacaacattacgtaatagtcaatatgctgagaagcaagactgtacatccacccgagtcattcagaattcttagtctggtctttcacaattggcgccctctgtcagactcagacaaggctctattttgaattctaatgaggaccaagcacactgaatatttaaactgcaattacaaagatcctacttttatgtaaatgtccttaatggaagtaacagatctgaaaatacatagaggtaccagtggaaaaatatcagtctaatttgcatttagaagctagaaaaaaaaaaaaacagtattgttttctacttgatgctatcattggggtggggttgagggaggaaaagggaggaaaatccacacaaaaatctcggtaaaaattttaaagcctgtgctcctgagtgaaaggttcacaaagaggtacttgaatcccttgttaagaactgaacaaacaaattcatcatcgggcctctctcctgtgtggccccttgcagttcagtctgtattcataactagaaattctctcactgctcaagcatctatgactgatacatcggcccatcaaggaagatatgccaagggtagcgaaacaaaaggccatttcatgattcacaacctatttttacactcctttgtgtaaaatgatgatgtggcggctgctatccacactgcacccaagtcctcttaaacagtgatagaattgccctgtgaatggtaattgagttacactccactgggctgcttaattcccaccccctatagttaaagtacaccttgcttgcagtttgattatgcatttgtatgtgttcatatataaaacagccaatgtggctttgcacttgagaagagcaggtggttaactcttcgctgtatctcgaagctcttgcaccaaccctctgcccctcaaacgcctttcttattaagatcataatttaactgcctagcatttgggcattctcttcaagatgctaacatttatcaaatggattatgctttttttttttttctttcttctggtttgtcctctggttgattctttcttctgctgataccaaatatgttcactggattttttaatttcagttacctgttatttctagaagttctatctggtcccttttcaaaatttctgtgttacttattatagttttcgggtttcttaagatgctttcaagcttgtcatttttaaaatatattttaaaaagtggaattgagtttataatcaacgtctgataattctactactgcaattctgttcagattcatgtccatggtctattgctggtcctcactcatgctgtgctgtttccgggtatgctagaatatatttgactatgtgctggtcattgcccttagaaatttatttttagttggctcctagcatcctagaatatgctttcctccagaggcatttcatttgtttttgccaggcacctcgagctataacaggtgagtctgcctcaaaccaaattcatggtatgatgtttcccggtctaccctgagtatgtatgtccagggggcaaattcacatgtgggcctttctgtgaccacaagttgtcaatactgtattttccctcccgtctttttcttctcctattctgctcagtgccaacgctgccctttccacaaccccccatggtaagtttagttctggttcacttttactctgagggtgtagctctttggggtcccagtttcttgtgggaagggtctcccatgacatttcctaattagagtgggtgcccagggactaaatttccaccccatttgcctgcccctctcaggctacagaagtgtctggctttatcagattaaaaaaattatttttatttttatttattaattttttttctgagatggagtcatgcttttttgcccaggctggagtgcagtggcatgatctcggctaactgcaatctctgcctcccgggttcaagcgattctcctgcctcagcctcccaactagctgggattacaggcacgcaccaccacgcctggctaatttttgtattcttagta[144 bp omitted]aaaatactgaaaagtgggccaggcgcggtggctcacgcctgtaatcccaaaactttggtaggctgaggtgggcagatcacctgaggtcaggagatcgagaccagcctgaccaacatggagaaactctgtctttaacaaaaatacaaaaattagcccagcgtggtggtgcatgcctgtaatcccagctactcaggaggctgaggcaggagaatagcttgaacctgggagacggaggttgcagtgagctgaggtcatgccattgcactccagcctgggaaacaagagcaagaagactccatctcaaaaaaaaaaaaagaaaagaaaagaaaaagaaaaagaaaaagaaaatactggaaagtacctaagagtttagaggctgaaagcaaaaccaagccaggctaatatgaaggttcctcaaacatttaaaaactgaattaccattttatccaacaactccacttctgtatatatacacaaaaaaggaaagacttgagcagctatttgtacagcaacatttatggtggcattattcacaatagccaaaaggtggaacaacctgtgtccactgacaaatggataaacaaaatgtgatatatacataaaatggaattattattcagccttacaaagcaatgaaattctgatacacactacaacatggatgaatcttgaagacatcaccctaaataagccagatataaaagtatacatatgatcccgcttacaataggtacctagaataatcatatctacagagacagaaagtagaaaagtagttaccaagggctgaaagagggaggaatagggaattattgtcttggataaatttcagtttgggatgttaaaaaaagtggctgggcgcagtggctcacacctgtaatccaagcactttggaaggccgaggagggtggatcacccgaggctgggagtttgagaccagcctgattaacatggagaaactctgtctctactaaaaatacaaaattagccagatgtggtggcgcatgcctgtaatcccagccactcaggaggctgaggcaggagaatcgctcgaacccggaaggcagaggttgcagtgagctgagattgcaccattgcattccagtcagggcaacaagagcagaactctatctaaaaaaaaaaaaaaaaaagttctggacagcctcggccacgaagtgagactctatctctagaatttcttttttttaatgccactgaactgtacatttaaatgtagttaagatggtaaattttatgctatatatattttaccacaattaatttttttttttttttgatggagtctcactgtgtcacccaggctggagtgcagcggcacgatcgcggctcactgcaacctctgcctcccaggtttaagcgattctcctgcctcagcttcccaagcaactgggactacaggcgtgtaccaccacgcctggctaatttttgtatttgtagtagagatggggtttcaccatgttggc[132 bp omitted]gagttgctagacctactcagtaagttccacaatatgctttgtgttcacaggcataatattgatcagttgaaggcttaaaaggaaattcctgagaggcttaaatacttgactgacccccgtacagctttagagaccacatgctgaccttcatcgacatgcaaaaactagcactgcatgtcaacaaatgcatatataaaatgcaaaaattgtcctgtaaaggtatcaggcataggaaataagtacagttacttggttgttgatccataatactgataaaattattaagtaaatattacaaaaagaattgaagaaataacagaaataatgatctctaaagtatttccattaaaagaataaagaggttgggcgcggtggctcacacccgtaatcccagcactttgggaggctaaggtgggcagatcacctgaggtcaggagtttgagaccagcctgggcaacatggtgaaactccatctctactaaaaatacaaaaattagctgggtgtggtggtgcacgccttaatcccagctactcaggaggctgaggcaggagaaatcacttgaacctgggaggcagagg[136 bp omitted]ttctcccttttgaatcattacatataattctgtggcagataatatatacatatataattaaataaaatgaggcatgagataaatgtatagttattttaaaatatggacacaagttttccaaacgtattttagtacttctgggattccttaaattcttttctattttcaaaaaacaacacttaagagtccagctcagaagacattatgacacttctgggtaaaaatactacacaccagatattaacatcaaattaaaaactggcaacagtgtaagaaatattccacattcattatgacttcatgagtggcatgtgctgagttactatgttgcaaacacaaaaacttgccaacatgtctatgaatatattcattccaaactagcaacataattgctgagaacaacaaaaacaacatatataacattgtatgtcttcctgctctagacatatagtaacgagagctaataccagtacttgctcaccgcacacaatgtaccaaagatggttttaagtgatatatatatgttaggttggtgccaaagtcattgcagtaatggcaaaaaccacgtttacttttgcaccaaccatatacatatatacccacatacacatacatacatatatatattacatacacgcaatcatttatttctcataacaatcctttgaggtctatatctctattatccccatttcaaagatgggaaaatcgtggcaaaagggagtttaggctttcctgaggtcacgcagctagagagagttcgtgaagctcgggtgtgaggccaggctctagagctcactctcatgatatctatgctctggcacctctcacatacgtatggaaagctgggggaggtggccagcactggacactttacatagtccatacaactgaattttgataaccaaattctccgctttcttataattaggaaactgaggcccagattaagagagaggtggaagtgaactcatattgagaggtgaagccggctggacttctgggtcgggtggggacttggagaacttttctgtctcactaaaggattataaacacaccaatcagcgctctgtgtctcgctaaaggtttgaaaacgcaccaatcagcactctgtaaaaaatgccccaatcagcgctctgtgtctagacaaaggtttataaacacaccaaccagcatgctgtaaaacacaccaaccagcacgctgtaaaaatgcaccaatcagtgctctgtgtctagcttaaggtttgtaaacgcaccaatcagcactctgtaaaaatagaccaatcagcactctgtaaaatggaccaatcagcactctgtaaaatggaccaatcagcactctgtaaaatagaccaatcagcaggacatgggcggagccaaagagaggaataaaatcaggccacctgaggcagcaaccctgacccgctcgggtccccttacatgctgtggaagctttgttctttcactgttcacaataaatcttgctgctgctcactctttcggtccgcaccacctttgtgagcagtaacaccggctgcaacggtctgcagcttcactcctgaagtcagcgagaccacgaacccaccggaaggaagaaattccggacacatctgaacatcggaaggaacaaactccggacacaccatcttcaagaactgtaacattcactgcgagggtccacagcttcattcttgaagtcagcgagaccaagaacccacctgaaggaaccaattccggacacagtatctctcatctttaaagtttcaggatctatcatagataacaaagtccctgtggccagaagttatgggagaagattgataaagcaaaaactgaggaccagaagcacagggcaggatggtcgggcaggacagtggtgataaagggtctcaaggagaccccatggggctccactacctctgagcttgcagagtctctatgtgcctgaccctctctcaccccattgttctagccttctttcttactgagcaaacacagccagggaaggtgatgcttctgaagctgcacatctcagggacccttgcccagagcttccaaagtggacagatggagaggatccattacatttttcatattaaaaaggctgaaagtttggcaaagtatgttctcagatctctaggttttttttaaattgcttttgtaattcttttttttttttaaagacacaaggtttcactctgtcacccaagtggaagtacagtaagacaatcatggctcactgcagcctcagcctcctgggctcaagtgattctcctgtctcagcctcccaagcagctaggactacaggcacataccaccatgcctggctaatttttaaaattaattaattttgagacagggtctcactctgtcacccaggctggagtgcaatggcacaatctcagttcactgcaaccttcaagcaattctccctcttcagcctcccaagtagctgggactactacaggtgtgtaccacaatggctggctatttttttgtatctttagtagagacagggtctcgccatgttgcccaggctgctaatttttaaattttttatagagacagagaggtcttgctatgttgcccaggctggtctcaaactcctgagccactgcaggtggcctgtgattctagttttcataaatatgtcagctttataatcttggtgcacccttgtgagacgaagcacccaaaaacaattactgtgattactactgctattcccatcatttatcatcacgtacctttgggcaaggcactgtgcaccggcaatacacaatttaaacctcacaaaagtctgcatcagaatttctgcagaacaagcacctgcagcagaactgcttggtacacttgttaaataatgaacattcttgaactccaccctagatctactcaatcagaatccccaggggagggcctcaggatcagtattttaagcaagccctccaagcgattcttatcttggcatatgaatccccattttacatacaaggtatcaagaggtaaggtgacttgacaaagataccatcactaaacataggatttgaactcaattaagcttgtggttattttaagacggcacaaaagcaagtgagatcccctttaaaacccgccaaccagtataatgttatacaatttcccaaaccattaatctctgtaaacacacagaaaggacttttaaattaaaaacaaaaacaacaacaaaaaaacaatgaatgatatgccctttgaactccatttcattttgaccagatttaaccattgtttagcaatttcagtgcttcatcaaatggaactgcctgtatcagaagagcaaccaaatccccacagtaattagacaaacaggaaactcagagcagagtaaatccacaagctatgacagaaacagagccataacgtagctatctcttaccacaagaggctgactttctgtccaccatgtttacccgcctggtttcattgcgaagtttttcatctgtgttctccactaggttggcaaggtcgtcaattatctctagaaaggaaacatacatgattactattcctgaaataccccggttcacatcacagtatcacagctgtggttgttcatcctagcaataatgatctcgagtgcagtaactgaaaaggtacagaactcatgtcgattctttgaaaactgcaattctgattgtaaaaggaaaaaaaaaagcagtagtaaagaagaaaactgatttaacacaattccagcagacaggagaaatgccacattcagaggaaagaaagcatgacctgccgaatttatgcctagccaagctgtcattcaagtataaaggaacagacaggccaggcacggtggctcacgcctataatcccagcactttggaaggctgaggagggaggattgcctgaggtcaggagttcgagaccggcctggccaacatagtgaaaccttttctctactaaaaatacaaaaattagccgggtgtggtggtgtgcacctgtaatcccagctactcgggaggctgaggtaggagaatcgcttgaacccgggaggcagaggttgcactgagccaagatcacgctgctgcattccagcctgggtgacagaacaagactccatctcaaaaaaaaaaaaaaaaaaaggaacagacggcacagtagacttcagggactacctgggcccttcttgagaaaactacatgatgaagaaatctagccaatcaaaagataaataaagagatgatggagagaaccaaatccatttaaatactggactaagagtaaacaaatacgtggattagataacagaaaggtacagaaaggtcacaacagtacaatgtaattccaactgaaaaattagtcagtggttgcgagtggggaaggaaggtgaaaagaaattgaaagtgctaatttcttcatctctcgcaacgaggcatatcgagcagttgaaaagttaatcatacagaaacttgtagccttttaaaatcaccaaaactttaatgttttttgttaagcttgagggatcttttagtaattactatctcttgtaaagaatccttgatgtgggctgggcacggtggctcacacctataatcccagcactttgggaggccgaggcaggaggatcacctgaggttgggagttcgagaccagcctgaccaacatggtgaaaccccgtctctaccaaaaatacaaaattaatcggtcatggtggcgcatgcctgtaatcctacctactcgggaggctgaggcaggagaatcgcttgaaccagggaggtggaggttgcagtgagccgagattgcaccactgcactccagtttgggcgacagagagagactctgtctcaaaaaaaaaaagaaaagaatccttgatgtgaaattcatttcttttttaattctaatctttttaagtgaaattgagcccttcacaacatttaaaatagcatatatagtatagtacgatcttaactatgtaaaattatttgtatccatctttttatatttacaaacctataggggtatatgtggataatattaatctaatgctactaatgattatttctagatggtgggatcctgtgtgactgctgccttcttccttgcatttttctgtgttgtttgaatttctgtgtgttttttttttttttttttttttgagagagagggtcttgctctgtcacccagactggatacagggtaccacaatagctcactgcagtcttcaaggctctagcaatcctcccatctcaacctcctgagtagctgagactgtaagcatgtgccaccactcccaggttattgtttaaattttttgtagagaccaggccctgctatgtcacccaggctggtctcaaactcctggcctcaagagatcctcttgtgtcagcctctcaaagtgttaggattacaaccatgagtcactgtgcctggcctgaatttcttacagtgagcctatatagtcatgtgccacatgacatttcagtcgatgaccgaccacatctacgacagtagtaccataagtggtacagtattataatgttataataccatatttttactgtaccttttctatgtttggatacagaaacttttttttttttttttttttttagagggagtctcactcttgtcgcccaggctggagtgcagtggtgtcatagcagctcaccacaacctctgcctctcaagttcaagcgattcttccgcatcagccttccaagtaagtgggattacgggtgcgcaccacccgtaatttttgtatttttgtatttttagtagagatggggtttcaccatgttggccaggctggtctcgaactcctgacctcaaatgatccacccacctcgacctcccaaagggctggaattacaggcgtcagccactgcacccgaccatatttaccatcttgttacaactgcttacatgcaataatatgctgtacaggttttcagcctaggggcaataggccataccatacatatagcctaggcatgcagcaggctttaccatctagttttgtgtgagtacactccatgatgttcgcacaatgagaaaactacctaacaacacatttctcagaacatatctctgtcaagggatttatgactattatatttttcattttgttttttttttttcctccctccttctccctccttcctgtttttatagtgactgctttggagatgtgctgttcaataccagtcaccatttttcttaaagcattaagtaaagcaaacaaggaaatcaaataaagtttccagaatgatgtgtgagctaaattctgaaggcgacatgggtgaaaaagcaggaaaaaggcaacccatgcaaaaagaatagtatctgaaaggcacaaaggagttgggtgctcctgcttcttgcctcctgcagcacttcctacaaacctcttatttatagaccgtatagttatattctatcgatttgtttacatgtctttaacaggaagattatgatacaaactaatttttattcatccttatacctcccacccctaggagaatgccttg[146 bp omitted]cccttctctgctaaaaataccaaaattagctgggcatggtggcgtgcgcctgtaattccagatacttgggaggctgaggcaggagaattgcttgaacccaggaggtggaggttgcagtgaggtgagatcgcatcactgtactccagcctgggtgacagagcaagactctgtcttgggggaaaaaacaaacaaacaaacaaacaatgtcctaacttatccttgtttctagtcctgattcattttaattcattttctatacaatactcagaacatattttaattctctcatatttcaatgaattaaaatataaatagctacatgtatcgaacaactcagctctaaagcaataacttaaaaaagaaaccaagaaaacactcacacacacacacacacacacacacatatgccctgccaagaggtatagttttaaaataaaaattaacagaagaaataaaattacatactaaaaatgtatgattcaggaaaggggtaaagaggaacaaaagatagatgggatgaaaggaacagaaatacaatatctatctggcatgcttaaattcaactatatcaatagtcacattaatgtaaacagactaaacttttcaattaaaagacaaagggtatcacgcaagattttttttcttttttaaattatactttaagttctaggtacatgtgcacaacgtgcaggtttgttacataggtatacatgtgccatgttggtttgctgcacccatcaactcgtcatttacattaggtatttctcctaatgctatccctcccccagcaagatttttaaaaaaagatgacacaactatatactttgctatgaaactcactataaagcatagtgtttgtatgagaaaggtggcaaagctatattaatatcagaccagacagacttcttgaaaaggagtattattagacataaaaaggaacttttcatcatgatgaaaggacacatgtcaaaaatgggaaattctgtcatatttgaaaattaaggaaaacacttctgatttccccacagggcaaagatgaaaccacaagagaaagcagaaagcagaaagaaggacaactgctatagactggatgttggtgtgccttcaaaattatgttgaagcctcatcaccagtgtgatgacatttggatgtggggcctttgggaggtgaatggtgatgagagtaaagcccgtatgaatgaacgaatcctgttccatgcatgagatttatgaccttataaaagagttcctagagagcatcctcatttcttccaccatgtgaagttacaatgaagacagctgtctatgaaccaggaaacagatcctcaccagacaccagatctgtaggcaccttgatcttgactccccagcttccacaacggtgagaatttctattgtttataagccagccagttgatggcattttaatatagcagcttgaatagaacaagacaacaacctagcacaaaagtttttaggatgctactaaagcacgacttatggaagtttagtgctctaaatgcatatattagtaaagaagaaagatgtgaaatcaatgatcagactcaaggagctaatagtatgatcatctcaataaatgcagacaaagggtatgacgaaattcagtgtccatccatgatacaaattatcagcaaaatagaaacgaaagggaacttcttcagcctgaggaaggctatctatatttaaaactctcagagctaacatcatacttacaggtggaacatggaacattttttatctaagatcaggaacaaggctatgacgtctattctgacagcatctgttgaacattttattagaagtcccagattgttcaataaggcaggggggaagaaagcaaaaaggtatgaaagggagctgtaaaggtgcatttgcagatgacatgattgtacacccagaaaacgataaagtctatttaaaaactactagaactagtaagtaaatctaataaatttgcacatacagtcaatagtaaaaggcaatatatttctatataccagtgataaagaacggagaaaaaataaaagtaaaaaaatccattataacggcatcaaaagccatattacatactcagaaataaatctaactgaagatgtgtaagacctctataataaaaactataaaacattgctgggagaaatgaaagaaggcctaaaaaaaggagaactggcctgacccatatggtagttctatctgtggttttctgaggaacccccatgctgttctccatcatagctgtactagttcacattcccacctacagtataaaagagttcctttttttctccacatatcctcaccctcatttgttatttttttttttttcatatattggttgctcatttataagagagaacacggtattttaaagatactggttcatttttttttcaattgacagatatcgtacagaattttatacattgaatgcaatcttaatcaaaattctagcaggcttttaaaatgaaacctgcaagccaattctaaaatttacaaaga[225 bp omitted]gaggcaggagaatggcatgaacccgggaggcggagcttgcagagagccaagaaaggcacccactgcactccagcctgagcaacagagcgagactccatctcaaacaaaacaaaacaaaacaaaacagaacaaaacaagttggaggtattatgttaccaaaattcacaatttattataaatatatactaatcaagagagtctgatattagaataaggacaaacacatcaatggaacaaaacagagtccagatagacttgtgtgtgtgtgtgtgtgtgtgtgtacatgcacacacgcacgtgctcaattctcaacaaaggaaagaaaattcttttcaacatatggtgctggaaaaactggatatatgtatgaggaagtaaaaaacccctcaacccttttctctccataccaaaaaaaaaaaaaaattgtgatggttcatagacttaactgtaaaacctagaactgtaaagcttctaaaagaaaaaaaaaaaagagagaaaatttttatagcctggagtaggtaggcaaaaatttcttggacaggacataaaaagactatccacaaaagaaaagagattggtcaatctgatttagcaaatcctcaaaggaagtgatttctagattttgtgacatcctgatgctctgggcatagtattcttcctaaaatgtaatgggaggacttggacacatggcttcagtctttgtctcatcagcattgaacacagttctgtttatatatagtagcatatgtaaaagtggacatttttatgatccacgcctcattctctatcaagagaaattttctgttcatccaaagatactattacaaaaattaataaataagccacagaatggtagaaaatatttgtagaacatatatctgacatagtatttgtatctagagtatataaagatctcctacatattaacaataaagaaaagctaactttaaaataggcaaaagatctgaacagatgttttacagaagaagatatacaaatggccaataaacacatgaaaaacagctcaaatattgttaagtcattagggaaatgcaaatttcaaccaaaataagatactgcttcacactcactacagtgtgcaaactaaagacttacaatactaattgttgggggaaaatatggcacaaagggcgctgtacaagtatttgtcaattctcatcaagttaaccatatatctaccatcttacccagaaactttactcctaggttttttgttttttgttttttgaggtggcatcttgctctattaccaccctggagctggagtgcagtggcacgatctccgctcactgcaacctccgcttccgagttcaagcaattctccagcctcgccctcctgagtagctgggatttacaggcacgcgccactgcgcctgtctaatttttgaatttttagtagagacggggtttcaccatgttggccaggctggtcttgaactcctaacctcaggtgatccacctgcctcggctgggattacaggcatgagccatcatgcctggctcactcctaggtatttaccaaacggaaataaaagcctatttctcaaaaaaaaaaaaaaaaaagcctgtacaaaaatatacatagcaaccttattcatgagggccccaaactagaaacaacccaaatatccatcattaggagaacagaaaagcaaattggggtatatctgttaatggaatactattcggcaatagaaagcatgagctactcatgcatgccacaactgtctaaatctcaaaaagttttgttggctaaaaataagaaaacaatcattatatgctttgtgattccatttataagaaatacaaggataaacctagcctacaaaatagacatcagaaagtggttgcctctggggtgcttgactagaaagggacatgaggaaactttctgggaggatggaaatgttcgaaaggtcatacaaattcacgcaaatgggtacagctgtcaaaacacacagaagggaggaagggaagtcaggagggagggaagcagggagggagggagctggcaggcgggcaggcaggcaggcaggcaagacaaaacaaatgccttagaataacaaaatttcagacctgcaagagtcatgcaatcaccttgtagttccttccccttttataacatccctggcagtgggatggttaatctttcaccaaacactcccagagactggtaacatggaaactcatgagaaaatcagttccatggctgagttagagggtgactttgataattataaagtcctttattctgagctaaaattctgcctgctctcaacttctaccttaggtatttctttttctttcttttttcctcttctttttttgagacagagtttcactcttgttgcccaggctggagtgcagtggcgcgatctcagctcactgcaacctccacctcccgggttcaaacaagtctcctgcctcagcctcccaagtagctgaaattacaggcaccccttaagtatttctagaccaacacaatatcagtgttctttccttcataattttcctcatatatctccttggtcttctcctctaggttaaagatacttagatccaaactttagcaaacgctcaaaggaagtgatttcgagatcttgtgacatcctgatgctctgggcatagtattcttcctaaaaacgtgatgggaggacttggacacatagcttcagtctttgtctcatcagcattgaacacagctgagtttatatatagtagcatatgtaaaagtgggcttttttttctttttgagagggagtcttgcgctctgtcactcaggctggagtgcagtggcacgatctcggctcactgcaagctccgcctcccgggttcacgccattctcctgcctcagcctcccgagtaatgggactacaggcgcccgccaccacacccggctaattttttgtatttttagtagacacgggtttcaccgtgtta[132 bp omitted]caagacagtccacagtaacaatcatgctttgtacttggccttgtagttgactctgagcttggtacactgttctcacgcaaccgaatacaatcagtattgcgtgatgcatcaacgccacaatacataatacaaaattcagggctaatagcctctgttactataagaaaatcaagtgcaaaatattccttgtctgacaagaaatacagtatgtcggatgttatatgttaactgggtttctagatagatttctttgtaagtttataaatattcataatatgacttagaggtaaatcaataaatctgtagcagattagatcaatgaaaaccagtagtcaacacttgtagggattaatgttttaatctagaccgaaaacgaagtttttcattttggttggtaaacctctcctctttattagttgttgtttctaaacaactctattttttttttttttttttgagacattacttcgctcttgttgcccaggctggagtgcagtggtgtgatctcggctcactgcaacctccgcctcccaggttcaagtgattctcatgcctcagcctcctgagtagctgggattacagatgcctgccaccacaccagctaattttttatatttttagtagagacagggtttcataatgtt[135 bp omitted]gcagtttataaatgcgaggggaaaaagtaaacattatccaaataccccagtataacaacagtgtaattcc[142 bp omitted]agaaatgccatctgtactaaaaatacaaaatcagccgggtgtggtggtgcatgcctgtaatcccacctacttaggaggctgaggcaggagaattgcttgaacccaggaggcgggggttacagtgagccaacacagtgccattgcactccagcctgggcaacaagagcaaaactctgtctcaaaaaaaagaaaaaaaaaaaaaaaaaccatacattttcatttaattgcaatatataagcctcccccatctaatgatatcatttgtattttttcatgtagctacaaagtcttcagttataatttctcatggttacaaaatattcattccataaaataaccattccttaaataatagcccattgttggatacttagaatgtttctatatttctaaataatgagtctataaattctttcctccattatcattggttctttttaatcatttccttaacaaagtgtgattatgactgcctcataaactttgaaacagattgccaaattactttttaatagacttatactgccactgttggtttgatgggattcattccacttgtcagttatgacctcagaagatttcctaggccagagagccttggggaattcccactctgcagaccaggcactaccaaggtgggaatttccctaaccacagtctattaagagcaaattaaatacaggtttcagagtataggttgtgaaacaaccagctgactagttcagattcctgactgtagagcctccaaagagaaactgataccctgcttcctggtcagtacttgcatttggtttcacgaaggagcttatatttcaatcacatgttaatctgagatatcgagtgacattccagcacagaatggacaaaatggaacaacgtaaagtataccacaaaatgacagcatcacaaggattaagaaatattatatgatgtcaaaatacccgactccaataatacttcatcatttttctactctcaattacagcctcaatacattctatatatagggagagagtttgctatatattttcagatacatttggtgcctttttatactcataacggactcataatggcagtagtaaagtcattatgttattatgctttttgcttatgttcttaataatatttgaagacaaatgttaaaaaaaatctatagtgaagatagagtttttcttgagggtattagtttaattccctccgttccctataattgatatcatactcaaatttatcaatggaaaccaaaaatggggggtggtggtgacctctgataataccgtacactaggaaaagatacattccagagaacagggacacaaggaaaaaccaatctgtgacttcttaaaggaaaggtaatgctttgcctatggcatcctatggcagggagctgcaaggaactcccgcagatcaaagtggagcctctgggaaccacccaggctttggggacacagggaaagctcctttgcctggcagaaattccccttggccacactcgctcacaccttatacacagccagatgggccaggttaggcaaaaaacacaggctcctttccgacttcctcttgaccataaaccatggtctctcatctaggcttaaaaatgtgtaacaggagtctggacgcagtggctcaggcctgtaatcccagcactttgggaggctgaggtgggcggatcacctgagatcaggagttgaagaccagcctgaccaatctgatgaaaccccgtctctactaaatatacaaaaattacctgggcgtggtggtggttgtctgtaatcccagctactcaggaggctgagacagaagaatcacttgaacctgggaggcagaggttgcagtgagctgagatcgcgccattgcactacggcctggacagcaagagcgaaactccgtctcaaaaaaaaaaaaagtgtaacacagggtcggtgcggtggctcatgcctgtaatcccagcactttgggaggctgtggcaggtggatcacgaggtcaggagtttgagaccagcctggccaacgtagtgaaaccctgtctctactaaaaatacaaaaaaaaaaaaaaaattagccaggcatggtggtgggcacctgtagtcccagctactcgggaggctgaggcaggaga[132 bp omitted]agacattaaagaggcaaaacagttaaacgcaatctgtaatctgattgctggagcaccccctcaaaaaaaagtgacaaaactttattggggcaatggcagcaatttaaatagaaactccatattagtcattattaccatatcaaagttaagtttcttggatatgctaatgacactgcagttatataggaaaacaacctacacagaagaatattaggagatagattaggaacagatgccaaagtatatagaagcattacgagacaccctcaccttacttcaaaccattcacaggctgggctcggtggttcacaacttgtaatctcagcactttgggtggtagaggctggtggatcacttgaggtcaggagttcgagaccagcccggccaacatggtgaaaccctgtctactaaaaacacaaaaattagccagacatggtggtgcatgcctgtagtcccagttacttgggaggctgaggcaggagaattgcttgaacctgggaagtggaggttgcagtgagcggagatcatgccattgcactccagcctggacatcacagcaagactccatctcaaaagaatttaaaaatattaaataataataattcgctctggggggaaaaggtacataaatacacacacacactcatgcagcaacaaaaaagcaaaacaaatgtggctaaacgttaacaactggtgaatctagtaaatgaagggtgaccagatatgcctgaagaatatactgttaacttttctgtagctttagaaaaacctttaaaataaaaagatgagggaaaaaaaaaagccacagacttagattgggttacagaaaaagagagagagaaaaaaaaaaaggaaaccatattgctatatagatgggaagcatatggcagagtagggtaactaaagtcctagatttcacactggagaaataaaaagggagcctcaggagccaaaatgcaccaggaagatcacagactgggaggagcttagaaaagcaaccccttaaagttgttcatgaagtcctggattctcctttgagaagtgcatacacggagctgaccccaaatagtatacgtagacattgagagctgaactacaggagagaaaaccacccaactcccagtctggtcactggctactgcacctgtgggacagacccaaacagtactggaaagactttgaaaacttcttcaatggtagttggaacctgtggcctcaactcaaccagggcaattgcctgctaaaataaaaaatatcaacatctctgtaggatttaaaccaacagccagagtctcataaaataataatcaaaatgtccaggatacaacgcaaaattttgcagcatatgaacatccggaaaatttcaagttgcataagaaacctgggaaaagacaacaagatgccattgctaagaagcatagttgttggagttatctgacaaagactttaaagcagctataataaaaatgctgggccaggcatttttgggagctgaatcgtgatgattgtttgagcccaggagttcaagatcagtctggacaacatagtgagaacctgtctctacaaaaaataaaaaattagctgggcatagtggcatgcatctgtagtttcagcttctcagcaggctaagaaaggagaatcacttgagcccaggaggttgaggctgcagtgagctgtgactgcaccactacacttcagcctggatgacagagtgagaccctgtttcaaaaatacaaagtaaataaaaataaaaatgctccaagaagtaatggtgaacactcttgaaatatagtctcagcaaagaaacaaaaaatatagagaagaaccaaatgcaacttttgaaactgaaaaacacaataaccaaatttgaaaactcactggatgggatcaatagcagaatggacatgatacaggaaagaggtggtgaactggaagatagttccaataaaaatgaatagagcctcaaggacctatgggataatgggaaaaagtcaaacattcatgccactggagtctcagaagagagaaaaaagagtgtgggccagaaaaaatacgtgaacaaataatggttgaaagttttctaaatttggcaaagaacatacacctacatatttgagaagctcagcaaaccccaaacaagataaacacaaagaagtccaggccacaacacatcatatccaaattgctgaacactaaagacaaagaaaaaaataattgaacacaaccaaagaaaaacaacacattgctttataggggaacaaaaatttcaaagactggatttctcatcaaaaatcagaggccagaaggaagtatagcaccagttttaaagtgctgaaagaaaagagctatcaacacaaaattctataaccagcaaaactatccttcagcaccgaggtgaaataaagatactctagacgaagaagtactaagaaaatatgttgtcaacagatctactctaagagaacagctaaaggaagttcttcagacagaagaaaaacgataccagtaggaaacctgaaacgaaggatgaacagcagaaatggtaaacatttggataaatattctccagctgacttctctgtttggtggatgaaaaccaaactcatactgtctgatcttcaatgcacgtaagtataatacataagacaattatataccatagagcagggtaggcaaatgggcctatagggtgtaaggttgatacactccatgtgaaaagattagatactgattctaagtagactgtaaatttttaagtatgtatattgtcatccctagttaccactaaaacaatctatacaaaaagctacagtaaataacaaaatagaaaaataaaaaagcggtactaagaagttcatatatatgatacaatttatatgacattatcccaaagacaaaagtttagtgacagaggacaggtcagtcagtggttgtcaggagttaggaatgggtgagagtatggtcggtttacaaaagaaacacaaggaagtttctggagcaatggaatggttctgggtcccatttgtgtagtggctaaacaaacctacacatgtgtaaaaattcacagaacaacaaacacagtcaattttgttttgtgttaatttaagaattaaaatttaaaaatatacaagagagatacaggtaaaggtagaatctaagagaacacagtatgtaaagaacaagaggaggaaaaacaatagaagcaaagcaagtggcaaaaacaaaaacaaaaacaaaacaaagaaaaaacccacactgttgtcacagagggcagcgccgcaaggaagggagtgtggaatttgccatgtctactggatgggctactgggcagtcagtgtcaaccatgctaagcgcggctttggatgtgggagggatggggagagagagcaaagtgtctgaattgcaggaatgtatacatgtcaaagtgtgggaatgggaaaacagccaagtctggactagtgtattaccaaaagctcatattatttatttatttatttaaattcatttttttttttgagactaagtctcactctattgcccaggctggagtgcagtgacaccatcttggctcactgcaacctctgcctcccgggttcaagtgattctcccgagtagctgggattacaggcgcccgccaccatgcccagctaacttttgacagtttagtagagatggggtttcactatg[139 bp omitted]atttagtaaaaattgccagatgctaagccattgtttctcaatctagagg[133 bp omitted]gacatgatgaaaccccatctctactaaaaatacaaaaaaatagctgggcgtagtggcgggcgccgtaatcccaactactcggcaggctgaggtaggagaatcacttgaacccgggaggcagaggttgcagtgagcagagattgcgccactgcactccagcccaggtgaaagagcaagaccccgtctcaaaaaaaaaaaaagtttaaacaaattcttccacacccctcagtattgatgttactgtatttatttaattaaatataaatgtaagtatatattcattatgtttatagctctttatagtgctaaaacaaatattcatataaaaatgaaaactacaaaacccaaattctatttaaccacaataatttaatgttgaagacaatgcgtgttttgggaatcctaaattgtgcttaaaacatgaatatggcagctggacgcagtggctcatgcctctaatcccagcactttgggaagctgaggcgggcacatcaatcacttgaggtaaggagttccagaccagactggccaccatggtaaaaataaaaaaaatcagccaggcacctgtaatcccatctacttgggagcctgaggcaagagaatcgcttgaacctgggaggcagaggttgcagtgagcccagatcgcaccactgcactccagcctgggagacggagcaagactgtctcaaacaaaacaaaacaaaacaaaaaaatgcacaaatatggtacaggctaaggtataggtcctttgggtttgtcctgctgttctttatgtcaactgtgaaggcatcctttatacggtgcctagtgacaggctttggccttctcttggaagcaaatacttcattacatattaagtataccttcttttctcaacagccaaaaatgactaagatccaagacaattatacccagaagttcaaatgtgggctggaattgtatagccagacacaattagtcctcccagatgacccagaatattcttttaattttaaaatattatcatcagcataaaaacaaaacatgtagaacagctctaatttgaggacacagtgcaaaaagccttacattacttaggcgttaaacaaccctacaatagctgcaataaataaagacctcatcagttttcctagcccctcaatgaaaagtttactttaaaaaaatgtaagccacatcaaaacctttgcttactaaggtaacaacaataagaaaagaaagaaaagaaaagtaacattttccattattttagaagactggaatcctgatgataatgtgctcagctctgaatgaaataatttacagattatcaacatgtgtttcttagcaacctgtgtgcataaaaaggtacaatatattgtatgattccaattatatgacattctggaaaggcaaaactatagaaagggtaaaataatcagtggttgccaggagtttgggagaaaggggggagtgataaataggaggaagcataggaatttgggggggcggggtggcagtaaaaatactctatatgggccgggcgcagtggctcacgcctgtaatcccgcactttgggaggctgaggtgggcgggtcatctgaggtcagctgaggtgggcgggtcatctgaggtcaggagttcaagaccagcctggccaacatggtgagaccccgtctctattaaaaatacaaaattagccgggcatggtggcgagtgcctgtaatcccagctactcgggaggctgaggcaggagattcgcttgaacccaggaggcggaggttgcagtgagtcgagatcgagccattgcactccatccagcctgggcaacaagagtgaaacaccatctgaaaaaaaaaaaaaacaactctatatgatactgtaaagatagacaggtgacattatgcatgtatcaaaatccgaactgtacagcacaaggagtgaaccttaatgaatgtacattaaaaaaacaatcatttagaagactggagattccagcaataaatgcagactgtgataagggcatcaaactgcattacaaatgtatgcaacaacatcactgaatgaggtaggaagagaaggtgctgacctaagtagctttggaaatgagtggcatctataagactaaaagcgaagggacttgcacataagccctgaattctagttggtaaagttgtttcccacaggggtacaggttaacaattctgacaccgctata[136 bp omitted]aaacccgtctctactaaaaatacaaaaattagctgggcgtggtggcgggtgcctgtaatctcagctactcaggaggctgaggcaggagaattgcttgaacccgggagggagaggttgcagtaagccgagatcgtgccactgcactccagcctgggtgacaagagcaagactccgtgttgaaaaataacaacaacaacaaaaccaattaaggacatgaatagcagatagtgggagccaaactctcactgttggaatgatagtctacagataagcaagaggatgaggctacaacaatccatgtggtgatggatttgagaacaaacccacattgtatgtcagaggagtacagaagccaactggaagagttctcgataaccaaaggtggaagattctgaacaacaaaattgttttgaattataacccaaagtataaaataaatatccatgagtccatattgataaaaatacatgattgaggccgggcacggtagctcacacctgtaattccagcaccttgggaggtcaagaggggtgatcacttgaggtcagttcaagaccagcctggtcaacatggtgaaaccccgtttctactaaaggtacaaaaagtacaaagaaaaaaaattagccaggcttggtggcagttgcctgtaatatcaggtactcaggaagctgaggcaggagaatcgcttgaacccgggaggcagaggttgccgtgagccgagatcacgccattgcactccagcctgggggacagagtgagattctgtctccaaaaaaaaaaaagaaagaaagaacaaacaaaataacatgattgaataatacgtgaaggcgaagagacaaatctccagctagtttatgtaaatactccactgtcaaggaagaaagagtgtaactctctctttcttaggtgtaggctgcatgtagtgactcctttcaaagaacagtgtggaaatggggaaggagtaacttcgaggtggagaagcctaacgaacaccaccttagccaggtgatcgaggtcaacattagttacaaatcacattcacagtatgtgacatatcttgatatgatatgatgaaaatacactttatctgtgatcttccacccaacaactcataaccccagtgttatcataagaaaaacatcaggcaaattctagctgtgtagtatcctacgaaatacctgagcattacccccacaaaactgtcaacatcaaaaacaagggaagtctgagacaccgccacagctcagaggaaactaaggagatggagcaactaaatataatgccgtatcctagaacaggaaaaggacattgggtcaaaattaagaaaatattaataaacttactttaatgataatatatcaatatcggcccattaattgcacaaatatatcatgctaatgtaagacattaactacaggggaaaatggatgtggagtatacaggaaccctctgtactatctattcaatttctctgtaaatctaaaactgttctaaaaaataaagtcatactatctgatttcaagacttcctataaaactacagtcatctggctgggtgcagtgctcacttaaggaacctccagtaatttgggaggccgaggctggtggatcacttagggtcaggagtttgagaccagcctggcctacattgtgaaatcctgtctctactaaaagtacaaatattagttggtcatgctggtgtgcacctgtaatcccagctactcgggaggtggaggcatgagaatcgcttgaacctgggaagtggaggttgcagtgagccaagatggtacccctgcactccagcctgggtgacagagtgagactccagctcaaaaaaaaaaaaaaaaagctacagtaatcaagacagtacagtattcacatacggacagagaaaatgataaatggaacaggaaagggtgcagcaatagattcaggcatgtcgccaactgatttttccactatatatatatccacatgaacctcaggttccaaaaaatctcagcaggcccatttcttccattctcacagcatccctatttacatggaagagtgagaacatactaagggatcataacaattcccgagtggctcctatgagcaaggtactgtttccattcatccttaggctggcatgtgaggcaagtgttactaaaggtgaagctcaacaaggttaagtggtttgcgcaaagtgacagagctgaggagtggcaaagctgggtctgtagtgcaacctgtctgattctggcagctttctcacaacattcagaaagaaatgtcgaagaaagaaaaagtgggcgtcagctcaaacatcccaagcctgccctgtttgtcctgttttgttttgctttgttcgaaagatgagatccggccgggtgcggtggctcacacctgtagtcccagtactttgggaggccgaggcaggcagatcacctgaggtcaagagttcgagaccagcctgactaacatggcaaaaccccatctctactaaaaatacaaaaattagctgggtgtggcggtgcgtgcctgtaatcccagctactcgggaggctgaggcaggagaatcacttgaacccgggaggcagaggttgcagtgagccaagatcacgccattgcactccagtctgggcaacagggagagactctgtctcaaaaaaaaaaaaaaaagaaagaaagaaagaaagatgagatcattcaagtttactccataagtgtcttccaaaatattaagtaaatatttaatgaatagttactaaaatgaacatggtagcttattaggccaaatttatgatccagttgagtgtgcctgtatgttatatatacattttataataacttgggggcttctgcataggcagtggaattattta[136 bp omitted]gcctgccgagtagctgagactacaggcgcccgccaccacgctcagctaattttttgtatttttaatagagacgggattcaccgtgttagccaggatggtctcgatctcctgaccttgtgatccgcctgcctcagcctccaaagtgctggggttacaggtgtgagccaccgcaccaggcttatttatttatttttttttttttgagatggagtctcgcgctgtcacgcaggctggagtgcaatggtgcaatctcggctcactgcaacctccacctcccaggttcaagcgattctcctgcctcagcctcccgagtagctggtattacaggcacacaccaccacgcctggctaatttttgtatttttagtagagacagggtttcaccat[138 bp omitted]atgttatttcaattgttataaaaatgtacagtggttacttttgctctgttgtatcttgttggttacaatcatggattatctaacttcaagtcttggatcagaatacaacctccaactgtgagccaaggtcatttgctaacgtttcccccctcacaattatagaaaatgctgtacagtttttatatctctattttatcattccagcttctagagaatctctcatgaaatatctagacccgaactagtagaactctgctctctttgaaaaatagcctacatttcaaatccagatcttaggatatgtcagcctgagaaacttcctttccttctggactcagaaatgctaacaggatcacagccttacattgccatatctgcccctgctattgaatatttagagcaaattctaatttcaaattcttatagttagaacaaagtatttaaatctaaaaataattagagattgagaaagtctagaatgctatttctgggttcttcctcttgtatctcaacaaaacagactagctttttatgaaattcataaacttatgttatttctaagttaggtcttatactctgttttcagtcgatttcatataaatgaatagttttaaaagtagttatgatgatggtaatacaattttgaagcactctaaccattttacaaattgtttattgtctcatctgatactcctgtcaatccggaaaaatatacagggagctgttagaatattttatagatgtcaaaacaggcccacatggattacgtaacttgtccaagttacctcactaataagtgctagggcaggagaagacgggtctctggatttcagtctgaatgctttactcagaagctcatgcctctcctgtctcaaatttcaggtctaactccagactaaatatagtctgcattcttctcattccataggaacatcaccttggtttctccatatttctctttcttataggagatctctgacgaagcccagatagttgggtaagactgagatgctgacagattgagttccatgacatctgtcagttagaaagccaaagttaaccatgtactcttgttttaaaaaaacaagtaacttgaagaggttttctctactttacaagagagcattcctcctttgtggaaaagttatctaccattttccacctagtcttcacacttcagacatatttttttaggtgcgtttcacccttctaaaggggggatgtgaagggaagagctctgtaccagcaatttccagaggcagggatttacaggcaggtctcttagagccacagttggcccatgtatctttgattttctgattatatgtacgttttcaatagcccttgtattttgtttatttatttatttatttatttattattatttgtttttagacagcgttttgctcttgttccccaggctggagtgcaatggcacgatctcggctcactgcaacctccgcctcctgagttcaagcgattctcctgcctc[219 bp omitted]ctcattttattccaacactgctgcttgcatttctttccaagcatagagaagaaatccaaatacaaagtactacacataatacagtgcaacaaaaatgaggtaggggcgtcccactcattaaacaattgctgacttgaaaatgtcccaattttataaaatgtatcaagagaccgacactttgcattgtattttattcctctatgtcagttaacaattaattacctctcagctccaaattcacccttcaatacctactctgcactaactggctgaactctaagaattcctcctttgcagtgagcatgatgctaaacttaactttcgcagcagagggcgatagagggaaaatgcaagaggaaagggttgctccagaatcctgggtgcttgtgtgtttttcttcttcctgctaatgccaggctgtatcagtgactatggatacggagaatatccaagggtgctccatcccaactgtgagctcatagcagacaacgagcagagcttcacgaattcatagcttcggtctggtgactgcctcgccacagccctcctgacatgaacatcacaaacccatcatatagaggactgacatccaaaagagacaaagggcattgtagggataaggggatttggtggtacagggacactccataagagtctgtccagactggaccaaggagataaaggaatcaggggagggaggagtctccaatcaaaagacgaaactgacaggctacctacaaacaccatatcaatctagagaggaatttcacaattctatcacaggtatgggggactggtggtgaaagtatcgataaagacaactatgcaaagttttaaacagaagcaattactttagagaaaagggcataaagaaataaaatctaattgcagtacacaccatggctcagttgtgaatgacatttacataatcatagaacaataaacactgattcaacactgaaaacactgacatgtgtgtgcgatggcataagtaggaaatgtgtgtgtgtgtagacttacttcaagttagattaacatcttccttaggaggaagtcaacagatgtcgaagactgaaaacatttaagaaatagcagcatattatttagaaatagacattcaactacatttgacccttaaacaacttggaggttatggtgccgacacccagcaaagttgaacatcacttttttttttttattttttcccctgagatggagtctcgctctgtcgcccaggctggagtccagtggcacgatctcggctcactgcaacctctgcctcccgggttcaagcaattctcctgcctcagc[205 bp omitted]aaacttaactaaccgtctactgttaactgaaagccttactgataacataaacagtcaattaacatattttgtatatgttatatgtattatacattatattcttacaataaagtaagctagagaaaaggaaatattcagaaaatcataaggaagagaaaatatattaccaatttattaagtggatcataataaaagtcttcatcctcgttatcttcacattgagtaggctgaggaggaggaagaaaaggggttggtcttgctgtctcaggtggcagaggtggaggaagtgaagaaggtagaaggggaggcaggaaagggaggcacacttggtgtaattttatggaaatacactgtaatttgcctgacttctttgctttttcatttctctaaaaatgtttctatatgataccaatccttcttccactgtttgctttagtttcagtgcacattatcacagaagggtccatgtcataaaagaagtcaaaagtagtctttttttttttggatggagtctcgctctgtcaccacgctggagtgcagtggcgtgatctcagctcactgcaacctctgactcccaggttcaagtgattctcctgcctcagcctcccgagtggctgggattacaggcacacaccaccacacccagctaatttttgtattttcagcagagatggggtttcacc[137 bp omitted]gatcgtttagccagtttgttttctggcactgctgcttttatgtcttcttcctcgttgtctggcactggtttggaagcagacatctccatcaggtcaacttatgttaattcctctggtgtggtgtctgttagctcttgattttctccaagatccctatcttgaaacccttcaacctccacccacatccccaatttttttttttggcctctccacagtctctctcatgatttttttgtttggctctgttgtaaatcttgtgaagtcatgtactacatctggacacagttttctccagcaggaaattattgttttgggcttgatggcttccatagctttttctgtcataacaatagcatcttcaatggtgtcattattctagactttcaagatgttctatcggggttctcttccatagcattggcaatcctttctgtagagtaccacgtgtaatgagacttaaaggtccttgtgaccccctgatctagagtctgaattagagaccttgggtttggaagcaagtagaacacattgatgccttcagtgttgaacctttggggttctgaatggccatgggcattgtccagtatcaaaagaactttaaaaggcagtcccctactggtaaggtactccctgacttcagggacaaagcatcaatgaaatcgatctggaaaaggggctcttgttttctaggccttcttgtacaacgaaaagatgagcaactttttgcttcaaggcttggaggttagcagctttagatataagggcagtcctgatcataagcccaaatgcatttgcacaaaactgtagagttagcttaacccttcctgccttaaattctgatgcttgattcttttccttactagtaaatgtcatgtttggcttttccccccaccagaattggtcactcacttgcaatgaaaatctgtcaggcagatatactttctccttgataattttcttaatgacatcttggaacttgtctgctgcctcttggttgatggaagttgcttcacctactatcttgacatgattcaaacaaaacctctttctgaaattatcaaaccatccgttactggcattaaattctccagctttagatcagatccttcactttccttttgctttaagttgtcatagaatgacactgctttttctcagatcacattagcgtgtatagatatgcctttcttatagcaatcctgcactacagaatagctgcattttcaatatgagattaaaaggtataagtgcaaggattttgcacctgctggcatagctgcagtgacggcttcatgtatttccttttcttataattatccttatgatggatttatttatcttgaaattgtgggcaattgtagctgcagaccttagtctgcagtacatggcaagcaattcaacttttccttgtaatgtcataactttacttcttgggagcatttccagggtgaatcactagtatcacattgtatgggtcccatggtgttgttcagtgtttatattattgcactaaacacaaaaaataagagagaagttcaaggggccactttttttgtactgtggtatacaatttactggagcgataactgctcaggcagagatgattaacatcatagagcagcattttaagtggatactcacagcatctgagcttgcctcaatagcaacaggaggtgactatgaaattactacattatcacagtatgctctacagttcattttgtgcagcatgatttaatactgcatctttccatttgtttacatttctgtccactgtgaaggatgccatacatgatctgtgtttgtgtgcatctgttttgataaattttaactttgcaagtagatctgtgtatattttatagtagcaaatgataaaatagatgagcatctgcatatatttttagcatttttacgtagctaactttttcttaaaaattttcagtgtttctagactatacaattcatctgagagttttttcaaattgtcacaaatctccaaaaaatttttccaatatgtttattgaaaaagatccatgtataagtggagctgcatagctcccgggtcaagtgtatattggactatagacactttaccataaaccactaaaagaatcataagcactggttctgaggggtaagacttggaggcaaggagggctgatgaagagagctgcttctcctaagctgcctaattctgattgttcatactattcagaggtattattctgataaaagtgaaaattaaattttaaaaaattaagtccaaagaagaatgttaactgaataataaacaggtcaatatgaaagaaatcacgaaggcctcagaagcactgcttcggcaatgaagaagcactggaaagtttttgcaagcaaatgccatgatcagaactatatttttaatatatgtgacttttaaaatagagacggggtcttgctatgttgcccaagctggtgtcgaactcctaatctcaagtgatcccccctgccttggcctcccaaagtgctgggattaaaggcatgagccaccccacctggccccagcaccgtattttacaaagaataggagggagatagaaaaaacaaaccatagacaaaaagaaggagagcttgaattaaaaacaacaacaaaaaccacaaccaaacaatagaaatgtgttgacaaaaggagtcaaactctgtaaaatatttgaagggatttattctgagccaaatatgagtgaccatggccgtgtcacagccctcaggagatcctgggaacatgtgcccaaggtggttggggtgcagcttggttttatacattttagagaggcataaaacatcaatcaaacacatttaagaaatacattggtttggtccagaaaggcgggacaactcaaagcagggggtggggttggagggggcgggacagcttccaggctatgggtgaatttaaactttttctggttgacaattggttgagtttgtctaaagacctgggattgatagacagcaaatattcaggttaagataaagactgtggagaccaaagttcttctgaagtcttacagtagctgcccttagagacaagagatgacaaatgtttcctattcagatcttagttaatctctttaggattgggagggtctggaaaaagaaggtctagctatgttaatggagatttttacagatgcaaatgttccccccacaaggaacagctttgcagggccatttcaaaatatggcaaagaaacatgttttggggtaaaatattttgattttcttccttgtcttgtaatgttacgccagaggcaggttggaaagttaagtcacgatatatataaaaataaaacccgtctgatgagaatttatgatttatggggcatgactccccagaccccttatataggaatttgggcaagataaaaaaatcagagtttagttctcaaatgtctggcgaacaccatactgaatggaggaaacagcgctttggactccatttgtggcgggaagatcagaagggtgtaagcgttggtcactataaggatgtctcaatctttatccatctagtaattctccaactataaattagttatccccaggaaagggatagccagtgagggagtcatgaacatcatagtctttcttgtagaataccatctcatatatggataaaaaccaccctgggttatgaatcagtctttcaagagctttcacctagtgtggatttttagccatgtctcaatcagaccacccttgagtaaactgaccatcaaagttctggacctaagagctgagaagccaaaccttggaagtaatgatgcttggataaaaaccacaaagccatgcttactcatacatcctttcactcaccagggctctggcctacgtgtttagtaacatagactaaggaatgacaggttaacttttttctttataacacagctacaaaaagatggaacagagaaaatggggtagacaatgtatctggatttcaggaagacatgtaacaaaaacggaagccattacacctgtgattaatgaatcagaaacatcctcttccagaaaagtctacgtgagggtcctaagtctacgtgagggtcctatgcaggtccaggagaactggggattctgagaaattaggacagacgtgcactaggaacagaagaaagaatcgtacctactggaatgcactcaggccaagccacaaactggaaatcagagttaagcccaggttctccctaccccccctactgctcagaacctctctattccaagtatggtactcagccagcagcagccactgcccaaccccctgcccccgcccccaccagagctggttagacatgcagaatctcaggctccacacctcaaatctaacaaatcaaatcttcattttaacaagatatcacctatgcccattaagtttgggaagcaccaacttaggagagaaaggagtctttccggtttctgccttcccccgtggtgcctgcaggcgtagaaactaggcaaacacctggtgtttaaagctgtctagatagtaacagaatcatttgtatactatgaaagtgctaaggagaatctggcaactatgtatcttctggaaaaggcactgattccaggacactcaattatgtcttaggagcttgattttggagttaaatgagaagaatacagcatgaatcacggatttccctttatagccgcctattttatttaaacaaaaaatgctaaacattaattttagttgtacttaattgaataatttctcaggggaatcgttcagggagagtttaaaactgcctgtttccaaaagccattacaaattggcatatactattatgtcactgtgccaaccaaaacagcacactttaatgtccctgaggccgccttcgctccagatgtgttcagaactcctagtaatgtaatgcaggcaaaaaccatatttacatgaagtcgtgttttgaatatccttttccaattatctggaatgagataatagatccctaattggaagcactggggggaaaaaaagccaggtcagtggttcctcccttgtgaatgcttttattagtgaaaactaaaacagtctgtacaaaagtaagagaaatctcctttgccacagttaatcatcggaacatctataaacttagaaactgccctatggtcacctctaattagccagctgatttttaaaagattgatcttgtcttttcctatgaatcgtaagtacgaaaggattgggggtgggggagggagaaatggaatgcaagggcaagaaatccaaaaactgctttggcaagagaacagacaaatgcgatggctgtacagctgttgctccctccaccttcatcccacccaaatatcttccactctgtttcatgcttgcatgaatggcatggattctgaatttctcttttattcctgactaatgatggtcataacatcactaccagataagtcatcattgcttatgattgagttaatttctatttcaaattatatctgctgataaagaatcatctgtttattctcaaagcatgtataagtaaaaattaaatagcaaattttacactttttgctaaaattgtacgtttccttccttaacattcattatctaatagagcttaaatttaagtcaaataagtgtttttgtacaaatcggcatttctcttccattacagtggagactggctcccacacgtcataaaacgcggtaacgtgccatgcaatcaggcacgctcagttactggagttgtctatcttcacagatgtcacagagaagccatctgaaaagctacgcatagtgcagctgttcttggctgttagcaagataaacttggaaaccttgatctttcaaatgttcaaaatcggaatgggttttccaaatataaattaattaccaaattccatgtgttgacaagcaaacactctaatgtttacgtttcaacttgacaaaagaaatgtaagcatattatccataaacttctaaaagaaacaaactccatgtattaacttcattacatttttttcctaaaatgtttaaaaacattatcatgaaatgtaacatacgaagagaaaagcaaaacttatgtgtacagtttaacaaatgattacaaagcaaaaccacgtagtctcaaaaaatctcaactcatttactcaatgggcaatcaacaaacatttacaatacaccaggcactgtgttaggtgctaatttgaacacttaggaagtattacttgttagcattatttgctcaaataacaaccactgcaaagtccataattcttacctacctgtgtttcaaggcaaacaaatatatactttatcatgtggacaaggagcattttcctccaataaatctaccctagaggtttgtactcttgggatacttaacaatatatcacttctgaaaggaccacaagaaagtgcttggtggtcagtaacacccagatgtgaacttttctctctgacctatactagcagtgaatgatgttctcaatgtctctctgattaacccttgaattcaggcctcttcctccagaacaaaggcttccccacttgggagctgcttagaactttcccaagcaccttgcaaagtgtcttatttttcatactgtgcttagatctgaaaaaagcctttgttgtagcatgaagactctaaaatccctggctataaaacgaatgttctcaacaccaggaaaaacacagtccatagctttgctttaagagaaattgttttgcctaattaatcacaaagttttcaagtaaacttggtttgtaaaattctcaaaagcagttcagctgtttccaaattgcacatcggaaaattcctatgttacatagtccgggataatcaatgttaaaacaatatacataacaggatcgtttcctcactaggttccatttctgtcaggaagggagggagaattttaagccaaaatcgtaattcaagccaataatctgcaaacttgggtgtacaagatgattcactggaatgtggaaagaaaatactaaaatttccattaatatgctgcatttacttcttaatctctcagcctttttagaagcaacctaatatatagaacagtagtatatataatttttcagatacaattataaaaatattcgagagggttgctcataattcctactaatgggatgcatgatctaaaaatgttggaagtcactgtactaaaagtggtatagacaagctataaaagaatacaagtacatggaactcaaaagtctcaaaagttaaatatctttgtcattattcaattaaatattaaagtcctagtagtaaaaagtgagtattcagtcaacttgagttgacggaggattaaaaaatacacaaatacatagtccaaggaacacagtggtaagatgttaatattagggaaactagggtgagggaaataagaaagctctttgcattatttttgcaacttttctataaatctaaaattggttcaaaatcaacacttaaagtgacttgtaactaatcacagcagcaatttttttttttttttgagacggagttttgctcttgttgcccaggctggagtgcaatggcacaatctcagctcactgcaacctctgtctcccaggttcaggtgattctcctgcctcagcctcccgagtagctgggattacaggcatgcaccaccacacccagctaattttgtatttttagtagagacaggttttctccatgttggtcaggctggtctcaaactcccgacctcaggtgatccgcccatctcggcctcccaaagtgcagggattacacgcgtgagccaccacacccggcctcacaggagcaaattttgaaaattattttaaataaagcagagtggaagttaccctaaaatggaagttactcatgtgcattcccccacacccaggctctccatcctatgccatagatcaccataactgatgtgccctcgacattatctcagagccctcattcccttcagcatttaagagtttctgtcaaaatacatatttgttcacagagtgctctctgcatgtaaatataattcgtctttagagttctgatagaagatgataaaaataggttgagaactgctgaactatagattgaggggtgtagaggaagtagagaaaggacgtaatcaaagaaaaaaatcatgagaatttccgaacatgattagatgtttgctttaggaagaaaagttgcaataggacaaagggtgcctatttaatagtaactggacactatgtgttaggcattgggctaagtcctagatgtataagaatgactgactgatggagatacaaccctgaccctcaagaagcttactagagaaaaaaataccagaaaggaggctgtgcaatagcactgagatgtaacagggagctgaactaggccagtggtggaagaccggccaggagcaacaccagggagcagaactcacccaatctgttatgagtaggaaattctttgctcacaggcagactgaccagggctaagtgggtcttttcactggagacagagagaatggcagttcaacacccctactctgttattgcacatcaactggcaagcactgcccaaaggtaaaatgtggacagagaggccaacaacctaggctggtagctgggggacatggagctgtgattcttgggaattcttaggaacacagctgtgaacgtaaaggagacctgtttctcaagacttgtaggttatttacatttgtgcacccagaaaagggcttcctgagcatcagattgtaattgcacagataggagctaagggttttcaatggtagcctttatctctccattgtttttccccctagtcatatctacctcagatctaaagaaacaagcttcaatccttgagaaactactgccaagcttccagtgtttccactaccccaacactatgtatatccacagaataaataggtgaatacaaagaagccagagaacaagggcttctgagtgaaagtggggccaagtgtaactgtgagaagctgactgccaacacagatggagggctgtgctcgtgtatacctcaacggaaaaaaacttgcagggacagccacaaatatatgtacgtatgtaagtatgtatgcatctatcgatccatccatcgatccatccatccatccgtccatctaaccgtccatccacccatccgcccacccacctatccactcaaccatccacctatctatccaacaaatcatccatccacccacctacccatctgtccatccatccatccatccatccaaccatctatctgcccgtccgtctgtccatccatccatccacccatctgtccatccatccatccatccatccatccatccatccatccatccatccaaccatccatccatccatccatccatccatgaaagcaaatgccagcatccaagaggtggcgaaaatccagcacagactcctgagtgaaggtaagtggtagctacagaatttccctaagaaaggcacagagcatcagtcaaattggagggaaagggctggaacactgcttctcaaactctctgtggtgcagaactttttttttttcattttcaatgtgtcacagacaaaagcttttgcaaaatacaacaaaaatgatttactaggaaaattaaatttttaagcccattaacagtataactggatgtcatggcaacaccaaatgttataaaagtctgaattcttattctcaatgtcatacttacctcattgcaaactggtaacaaacagctcaaggacaggcacttgtctcataaccatgctttgggctaggggacttgtgtgaagtcgagttgacagagtaaactgtctgaggtactcagtgagaactaaagctgacacccaggtgtcacagggtgagaccgctctacccagggtcaaccacaagaaccagtcaggcacaaatctgtttgtgtctgttttgggtcttctttctcacccagtcacaaaacacagcttttgatacttgctttgtttggaaactgatacctgagttctgcttttttttttttttttttttttttgagttggagtttctctcttgtcatccaggccggagtgcagtggcaccatcttggctcactgcaacctctacctcctgggttcaagcgattctcctgcctcagcctcccgagtagctgggattacaggcacccgccaccatgcccagctaatttttgtatttttagtagagatgg[134 bp omitted]tcccacagcctgaggaaggacaataggcctcaacacacagttgtaacaaggttggtggacaacagcctctttttctagcatcttcaaacctcttttcctttctccaggcacctttccttctgcctttaaacacatcagcctggggtcctctccttgtgtcataaactaattataaaatgaaacctcaagatccttcacttgatgttgacgccctccctagttttctcctgtgttagtttgcacctttctttcattaacaagttcctggtatctgtagcctcaaataaggtcctagaacctggcttctactctacatactctagtgaacccatcaatgaccctggg[135 bp omitted]catctctactaaaaatacaaaaaattagccgggcgtggtggcaggcgcctgtagtcccagctactcaggaggctgaggcaagagaatggcgtgaacccggtaggtggagcttgcagtgagccaagattgcgccactgcactccagcctgactgacagggcaagactccgtctcaacaacaacaacaaaaagcaatggcttttcttctgtatcatcttatccagcttcttcatggcttttgaaataggctgttcacccagcctttgaaactctcatctacaaatcccaaaataacatactaacccatttccagcttctatgctggcatcccttcttcttttggagttttctcacgtctttgccctggctgctcttgcttgtaacagtaatgagttctcctggatttatttacaactttataatgaaccccacttgggccactccaggcagtcatttcccttgagttctcattccctatctccaagtgtctccagagctgtgctgacgtgaaggtttcctgttaccttacacctgcttctcagccctggttgcacattaaaagcatgtgggttattttaagtcataccttacctaggcttcattctcagagatcccaacttaattggactagggtgaaactgccttgcaaagatgatgacatcgagagaaatgtagcatggctgactccatcctgcttctagcctctcaggctggctgtcctttgctcagtcctggacacaggccaaattaactatgggaggaatttagtttgtagtttaatttttttttttttaagatggagtctcgctctgttgcccaggctggagtacagtagcacgatctcagttcactgaaacgtccacctcccaggttcaagcaattctctgcctcggcctcccgagtagctgggattacaggcacatgccaccacgcccggctaatttttgtatttttagtagagacgggatttcgccatcttggccaggctggccttgaactcctgacctcgtgatctgcccaccttggcctcccaaagtgctgggattacagatgtgagccaccacgcccggcctgcagtttaatttttaagccaggataatagttattccctaaaacaaaccccctccttgctcagggactgaaaccacctttgaaaaaaaactaatgaaatcccatgagattaggattatgcaaggggcttgaattctgctaaaatgtacacagttagaggataaccagccagtgttttggaggtcacaagatttctaactaccccaattgttcctatagataacatcattattgtagaagtcaagattgatcttttgagatgttttttcagatttttccattctggcaaccaactgccttgacccagacctgtgactcatgactcagcgggtcctgtggccccctacccagaggctgactcagtgcacacagactgttttccacacccctatgggttcctctccagccaatcagcagcacccattacttaggcccctgcccaccaaactatccttgaaaaaccaagctttctgggaagctgatttgagtaatcaacttctgtccttctgcttggttagctctgcattaaactctttctctactgcaataacgctgtctcagtgaattggttttgtctgtgtagtgggcaaaaagaacacgttagatgattacagagttagggccaaagctttagtatatttttttcctttaatgctaagcctataaaaccattgccaaggaacgatttttctcaaagttagatgcaccctggaatcacctagaggagctttaaaattacagatgcccgtttcctactcccagaaattctgatttagttagttggggtataataaaaaatctatttgtctttgtccccagttcctggcacaaagctcctaaaactcttgtgatttccttactaataggagtgtcttttgttattcataaaaaaccccttgttaagcccctagcataaacatatctgagtttatgctaatgaggtgaccctcagtggggccctagatagcttcaggatggggactggtctccagaaggaaccaaccatgtgattacagagttggaactcttagcccccaaacccaacctctgaggtggtgagacaaactggagactgatgtcaatcacaaatggccaacgatgtaatcaatcatgcctatgtaatggaacctccacgaacacccctaaatgatgggactcagagagcttctgagtaggcaaatgcatccctgtgccagaagggggttgcatgctcactccacggggacaggagctcctgtgctggggacacttctggaccttgccctaagtgcctcttcatcaggctgttccttgcatccctggtaacaaaatagtacagcattttcctgagctcagtgagttgttctagcaaatcatcaaacttggtagaagattgtgggaacctccagtttgtagccacgttggacagaagtgtgggtaaactggagacccagtgcttgcagctggtatctgaagtaagggcagccttgtgagacggagcccttcaaactgtggagtctgatgctaattagagccagaattgaaccagactgtagcacagccaagtggtggcaaggaatcagagacgtggtattggaaaagtccccatatatttgttgtcaggagggaaaaacctctgattggtatagggtgcagcccagacatcaggcatcaggattttaaaactctcaaggtgattctaataggcagtgaaagtcgaaaactaacagtaagtgtgggatacatccccattaggagatggttctaacaacatgccagcagagacaatctaagaggatttattcaagaaattaaaggcaaaggactttctcctcagagaatgcccttttaccatgttctttccgtttttctaaaaaaaaaaaaaaacaaaaaaaaaaacaaggctgggtgcagtggctcacgcctgtaatcccagcactttaggaggct[133 bp omitted]gaggcaggagaatggcatgaacgtgggaggtggagcttgcagtgagctgagatcacgccactgcactctagcctgggcgacagagcaagactccgtctcaaaaaaaaaaaaaggggggggggaagggggagggagaggaacatttgagaatgaatgctttcattttttgcccacacccccccctctttttttttcttttttttttttttttaaagagatgggctctctccctgtcacccaggctggagtgcagtggcaccatcacagttcactacagcctcaacctcctgggctcaagcaatcctcccacttcagcctccttagtagctgggactacagacctgtgccatcatccctaatttttttcaaaaattgttttgtagaaataggggtctcactatgttgttcaggctggtccagaactcttggccccgagtgagcctcctgcctcagcctcccaaagtcctgggagtagaggtgtgtatcaccatgcccagttcgttattttatttaaaaaatttttcttagacacagggtctcactatgttgagatcgcccaaggtgatctcaaactcctggcctcaagtgatcctcccacctcagcctcccaagtaagctgggactgtataggcataagccaccattaattgctttgatttagaattaatggtttttaatttaccttataagaggccaattaaaatcaatcacctttttaacaaggtgtgttttggggagtggactacagatcccagaaaatacatggaaccagttggatcattcacaagagaagggtggaagttgaatttcaacagcaaaaaggacaacaaatgggaggtagatattaagtatcgagaatgctctatctgggaattccaacagcttcttacattgcatggtgaaaacctttctgttagcagagttggtcactgggtccatgaacggtcacggcctcaggatgaggccccaaacttaacctccactgagaagactgtgtttcctgagcccatagagctctattttgctcttatggacctgaattttacttaaaacaaacaaaacaggtggtgagaagagtgagcagaaatacatatccagtctaactgcagaatcccataagattcacggaaacttcagaggaaataggaaattatctgtgtagaaaccttttcttttggcataggctaacttttcagtaattgtgtaaaagttaccctcattgttcatttgactaaactactgtggtttattgtgcagtggcgttaaactatcaagaatcaatctgctgaacccacttaaacccattctgtaatattagtgttgggctgtttagatgaattagtcacacatctcacagtctctcttacaacattcttggtgaaaaattagaaaagcatgagctcaatgtgtattcttagatgggtaaccccatggcacagggaccgcactcaggaaatattcgttgactgaaggagtcctgagaactcatcaatcatattcaacatcggccgccagggactcagaaatccttgcccacagcagcggccctgaacctctgcagttctcttaagcccgtggctccacagccacctccctttttctcagcaggtgttctcatcaattatttcctaaagggcacgactccgccaagttagctctcttccttcgaccagtaaccttacctataggtgcctatcagttccattctaaatgtcccctctccttctccagggaggaccctcgcctatctgctgccaccgtggcccgcccacagcactttcccgcatcttcaccttctcggttctggcctgtttctcagtccatagacatgctccaacccctcccttctattaaaccagccttcatgctcatgcttactaagcttccttcttcctttcaacaccaaccttcttgagaggttaagtctacaattctgcccccacaacttgaatcctcatacactcacaacccactacaactgagcttgaggcgcgattattacggggacagtgttcctgccgaggtcatcagtgacttactggaaaattccaatggcttattttcagtcttccgtctattgatgagagtttgcactctcgttttatccaaccagaagagagtctctcaacttagaattgtggacggtcattttcataggcaacatttacgtgcatgtgcctttaagtacattagggggtggaaatggagatgagtcccattgttccaccagtttctcagcgggctctctgacctcccttgaaatgaagaaacgcaactggactattgcaataacctccaaattcgtttccccaacttgagtccttggatctcaatcctatacctatccctaatct[135 bp omitted]actccgtctctactaaatatacgaaattagccgggcatggtggcgcatgcctgtaatcccagctactcgggaggctgaggcaggagaatcgcttgaacccgcgaggcagaggttgcagtgaggcgggatggagccactgcactccagcctgggcaataagagcaaaactccatctcaaaaaaaaaaaaaaaaaaaatttttttttttttttttgcagattatataggccagagcaggcatgccttctcttgctgtaaataaggtttataatacaatgtagcagaatacagccatgcttatgcctttacatggtgaccctggctgctttatcctttcccctgctcctgggagtgaactaggtgttcttttattgaggtgaaattcagataacataaaattggccaatttaaactgaacaagtcagtggcatttagtacatctgcaacactgaacaatcaccacccctatctagtttcaaactcttctttcctcactccaaaaggaaacccataccacttaagcagctgctccccatggccgcatgacatggtttggctctgtgtcctcacccaaatctcatgtcgaattgtaatccccacatgttgaaggaggggcctgttgggaggtgactgaatcatgggggtgaacttcccccatgctgttccaatcgagttctcacaagatctggtggtctgaaagcggagcacctccccctttgttctctcttcctcctgctccggccatgtaggacgtgccagctttccctttgtcttctgccacgattctaagcttcctgaggcctcgccgagccatgcttcctgtagagcctgtggaaccatgacccaatcaaaccccttttctttataatttacccagtctcgggtagtagttttttttttttttttgagacagagtttcactcttgttgcccaggctggagtgcaatggcgcgatcttggctcactgcaacctctgcctcctgggttcaagcaattctcctgcctcagcctccccagtaactgggattacaggcgtgtgccaccacacctgactaatttttgtatttttttagtagagacagggtttca[131 bp omitted]tgtgagaacggactaatacacccctctccctagttcctggcatcaccaatctgaattacggctccatggattcgtctgttctagatatttcataaaaatggaatcatacaatatgtggccttttgtgtccggcttctttcacttggcaggatgttttcaaggttcatccgtgttgttccatgtgtcagtattcattcctatttatggctgaataacattccattgtatggatatgccacattctgtttctgcagcaatggctgcttttgcactgtaactgcaatggtgaatagctgcaacacagatcacacggcctggcccacaaagcttactatctggccctttggtgacaaggttcgctgacccctagtttataccatctaccttcagaagtggcgattttccaaatcagcttgtattaatgatcactgaagcgctgtttagggaagaaaaatgctggacataaatgtctgtcattagaggactggttaaattacagcaaacacatactacgtaataccatgcagctcctcagaagaatcaggtaaatctgtacgtggtgataaagaagcatctctgggattaattaggctaaaaaagcaaaagcatgcaatgcatgtagtatatattcctttccccttaaaaaataacccataaataagtgcatatatacatatctgggtaacactttccccagaatcaaaagaaacgttcacttttcattttgtacctttctgcactatctgtaattcctaaccttaaatatgcatttccttattagcactgtcaataagtgttagctaaatgaggaaactatggtctgttttcttcttaataagtctgtttttagaagtaataatgaggaagcaatctaataaacgttattttttgttgtcgttgttttttgagacggagtctctctctctgtcacccaggctggaatgcagtggcacgatctcagctcactgcaacctctgcctcccgggttcaagcaatcctcctgcctcagcctcctgagtaactgggattacaggcatgcgccaccatgcccagctaatttttgtatttttagtagagatggcgtttcaccatgttgttaaggctggtctcaacctcctgaccttgtcatccgcccgcttcagcctcccaaagtgctgggattacaggtgagaaccaccgtgcccggccaaatgttatgtttttaaggaagaaaattcaaagcaaaatgctatgttgaaaactgacatgagttatgtctttttatgagctttcaattactttattttcttacccttgcaggtcagtgatcctccaaagataaaagaaaaacactgtgccacaggttagaattttttctgccagaaagctagacactgcaccagaccatctttaaagacgccgtccatatcagtcacgggctgagttgcaatcctagttttccgctgattattactgagaagcataccacatctgtcagccacaggacactgcaaatcttctactgccacagagttcagtatggcagtgacttaggcttcggcacacaagtcagccatgacaggttggtttgtagggtttatctacgcattctgatggtccctacacattttccagatgtgttgacctcataaaactgccacctaccccaggctgtgaaagaactgctccaaccatatttttcccacccctcaactctagcaacaccttgggttccctggctgggcgaccccctaagatatgaagctgggttggctgtcagtcctgagccctgacaagagaataacagcagggtggccgggcagccaggcatttttgcatccgcccagtgctgggaactgacgcattcctcgttccctggggcctaaggttctgcttggttttgggtccctgcaagattggggccctgcctactttctcaaccagtttatccttcaaccctctccctcaggccccaaaagttgctgctgaaggtccctgtcaacaggcaaacagtcaacccactacagacactcactcaccctgcctccaggccctctctctgcctggggcctcgtgttacacctgcctaaagtgcagcgcctggccttcctccccctgcctctggttaggatctccattctccctcgatcccctcttcttccactgtgacactctggtttccagatccttattcctcttccctccaggtcatgccctggcccattcttgatcaacttcgagttacagaatcagctctctcatacaagcattctgaacaggtcactggggtatggtagatacttgtagtatattttcttcaaaaagttacaaacagatttaactgaggaatcaatccaaaatcgagaatatcatctttcttggtgctgcctaggtacaaagcactttgtatatcttccgaggatgcaaagatatgacagtccccttcccttaaggagtttgaaatttagtagagaaaaaacaaattcagaaataactataaatcatccaaagcaaagaataccatgtaacacaagagaggttaaaagtgccagagtgtagaggatgaagagatcatctccaattggggaaactcaggaaaagattcatgaatgaggcagcacctgtggctgatactgatgaatgaccaggatttttatggggtaggacagaggccacagtttctgactaagaaaaagtatatttttcaaatcttctatattaaataatgagcaaatctggcctcttgtcaatatgttctttctaatcagctggctttttgtctgaaacactacattatatcacccaacactgtacagagaaagaatgccttctaggtagtcatcgttcaacaaaatctcagtaacgtcacaaaaatctcaatacttcagatttacaaaaatctcaataacttatcacacatgctcctgtccaggttcattcattttaatcatataatacatgatgatttatttgtatttataaattatgtatactgttaatatctgaatggtaaatgacatgattcttttgattgtcattaaaataaagaggtacacctgaagcaaggtgggggcactccacttaataattgcacttaatgataatcgctaccagctattgagctactgagcacgacacggactttaaatattatcactcaaaaggttttcatggtgaaaagcaaaccatgtaaaaaatgttcattacaatccatcatgatcaaaatttcaatgtgttaagatgttatcttcagtaatagttgcaaaataattgcggtacagcatttagttctttcttccagttaagtgacaggcaaactgtacagcttcacaggttctactaagcacggacgacaatctgaaatagtccactaatgtccctccaagctcagatccctagcacatattggagttagggacttcagcccaggccagagaaaagctcagtacacacatctaaaggcttggacgtctacagatgagccagtctcaatctctctcttgcacgcacgtatgcacgcgcacacacacacagctgaaacatggctccaaagtcccatccttcatcctataataactgtctctctcttctcaagtaggatcagccaaccactaaaaagcaccctgttaattagaacctagacaatctgtctttaatctgatacaatgcctaagtagcccaaaaatgctgaatttcaacgttttgaaggatttattctatgctaataaagaactgggggccaagtgtgggggctcacacctgtaatcttagcacttggggaagctgaggcaggaggactgcttaagtgtaagagctcaagacctgcccaaggccaggcacgatggctcacgcctgtaatcccaacacttcgggaggccaaggtgggtggatcacctgaggtcaggagtttgagaccagcctggccaacatggcgaaaccctgtctctactaaaaatacaaaaattagctgggcgtggtggtcggcacctgtggtcctagctacctgggaggctgaggcaggagaattgcttgaacctaggaggcagaggttgcagtgagccaagatcgtgccactgcactccagcctgggtcacaaagcaaaactccatcttgaaaacaataaataaataaaactaaaaactaaagacctgcctgggcaacacagtgagaccttgtctctagtaaaaatttaaaaaattagccaggcatggtggcacatgcctgtggtcttagctactcaggaggctgaggtgggaggatcgcttgagcctgggaggtagaggctgcagtgaccttatggttgaaccactgcactccagcctgggtgacagtgcgagactgtctcaaaaaataaagtaaaataaagaatgatggtggtaaaatttatcctctgaagattttcagaggttttacactgagcaaacaaaataattcaatataagttatatcttgtaagagacacacctagtattaccagtctatctcttactagatataacttatattacctagtattaccagtgtatctcttactagttaagagatagaaagatagtctgaaattcccattttaccactaattacctttgaatttctgtgatttttataactactttcagcttcccaaagttcacatttcctatttgctcggttggaagtaagagagttgctatctagaggcttctgggtattccccaatttgcaaagagaatgaattccaaaagtgtattcgtggcttagttgttcagaactcaaggatgcccaaatacatgttcccatagaaataacgttgtatatgtggcagacccgttcccaggtggcccatgagatctatcacaccatgtcacaggagtagcagtcttgatccagccacacctgatcactatgcacaacagtctgaacccgagtctgctgtgtgatgccaggaacacgcctccccagtgtggcaggcagtcacctgggcatcctgagacttgtgtgttgaaggagcaggacaaaaatccatgtcggtatttctgctataatgtgatatatacattcctgaaaaatctcacatcctacaaaatcacacttgaaaaataacgggatgaaaaaggctgttggggtagaccactaaatccctctgtaactctgtaaccagagcactaaccaaaagaataattaatacctagggagatgacttggacagcctaggcaagcagcttggctgtggctgcggctgcctcgagggatattaaacacacaaatgacagagtggcaactgttggctcacagacagagtggagttctgagccaggagctatgttaaggtggacacagagggaagatgcctgctgggagcccagagtcctagaaggctagcgggtgcctgtcctggagagaaagcgctgggtgcaggcactcatttttaattttcttaaaatagagttgaaaagcgtgtctgctgcctgtgaggttctttcctttcttgctgaaggctgtaactctactccggcaattcctgctcctctggccaaagaaaaactgcttctggatcaatctaacctccaggatatactgacatcattcctctgcttttcagttgagctgactcgtgctatggacccaagggctgtagcacacagaactgcactcctaggaccagtggctgctgactcctcagagttctcacctggttagagaaggccctttccaagtctcccatttctaaaaactctgaatcagagaacagggggtagtcatcctgtgagaggtaaattctcttgacatccatgacaattcaggcaagtcttttgtattctacttagtcaccagaaatgacttttgttttgttttgttttgttttgagatggagtctcactctgtctccagcctggtgggcagtggcgcgatctcggctcactgcaagctccgcctcccgggttcatgccattctcctgcctc[134 bp omitted]ggcctcccaaagtgctgggattacaggcgtaagccaccccgtccggcaaagaaatgattcttaatctctcttgaggtgtgttcaccctgagtggatcagtctgatttctggacaagccctgtctgatagaaatgtaatgtgaaccatgtctgtaattatgaaaaagtaaaaaggaacaatggcatattttatttaacccaatatagccaaatattaccatttcagtatgtaatcaatatagaaattattggcaagatattttgaatctttttttctggcaccatatcttccaagttcagtgttaccttgtacttacagtacatcttaattcagactagccacattataagagctcaatagctacaagtggcctgtggctactatagtggacaacaccggtctattcagaggctctgttgatagcaaagtgtcatatttctagagacacataattgaaagaaaatgcaaccaatgaggcacaaaacatgtttttcaagttcatagccccatatttcatgaaagggtacctttgacttggtcagtttcagtgcaaacatattaatccttaattacccagaagattcagttaaccagaacatcccaatcccttactatatactcagtggggtttttaaaacagttttattgagacataattcacctgccacaaatttacccatttaaactgtataattacatagtttttggaatgttatactattaattttttaaaattgttttgagatatatatatctaaaatggcaaaatggcacattttgttttatatattatatataaaatatataaatacattatttatatatttttattatatattttatatacatatatttatatataatatataataaatatttatatataacatatatttatatattataaatatataaatatatgtaaataggccaggcacggtggctcacacacctgtaatcccagcactttgggaggcctaggcaggcggatcatgaggtcaggagatcaagaccatcctggctaacacggtgaaaccccatctctactaaaggtacaaaaaattagccgggcgtggtggcgggcacctgtagtcccagctactcgggaggctgaggcaggagaatggcgtgaacccaggaggcggagcttgcagtgagctgagatcgcgtcactgcactccagcctgggcgacagtgcaagactccatctcaaaaaaatatatattatatattttatattatattatatattatatatattatattttatatattatatataacatatatattttatatattatatataacatatatattttatatattatatattatatatattatatataatatataatatatattatatatattatatattatatagaatatattatatataatatattatatattatatataatatatataatatatattatatagaatatattatatataatatatatattatatattatatagaatatattatatataatatatatattatatattatatattatatataatatattctatagaatatatatattctatataatatatatattctatataatatatatattctatataatatatatattttatatataaataaatataaatataaaatatatataatttatatataaaatataaaatatatataatttatatataaataaaatataaattatatataatttatatataaataaaatatatattatatataaaacaatttgccattttaaagtatataattctgtggcattaattacactaacagtgtggtataaccaccaccacttatctatttccaaaactttaaaattatctcaaacagcaactctaaccattatgtaataattccccatttccccctgcccctagcctcggtaacctctaatctactttctttctctgtgaatttgcctatcctagatattccatataagtgaaatcatacaatatttgtctttttgtatctggcttatttcactgaatgtcttccaggttcatatatgtaatcgcatatatcaaaacttcattctttttatggctgaataatagaccattttaagtacatactacaac[138 bp omitted]ctcccaggctcaagtgattctcctgcctcaacctcccaagtagctgggactacaggcgaccgccaccatgcctggctaattttt[166 bp omitted]ctcattgggtagcaggggtttttttgttgttgttgttttggtttttttttagtagagatggggtttcaccatgttggccaggatggtctccatctcctgacctcgtgatccacctgccttggtctcccaaagtgctgggattacaggtgtaagccactgcgcccagcctttggcttgttttttaataaaccatgagttgctgagcatctcattgggtagtagcatttttgttgttgttg[171 bp omitted]tgctgagcatctcattgggtagcagggtttttgttgttgttgttgttgttgttttgttttttttgtttttttgttttttagtagagatggggtttcaccatgttggc[132 bp omitted]ctggtgctgtggctgaattctagaaggtagtcctcttcccaattttactaactgagaaaagtaacaaggtaaggctcacttgtttaagaacagcaggttagcaacaacatagtgccaaacgttctgacattaacatcatggtgttaagaccacgagtgctgtactgtctccaaatacaggtcaaggctatgcttgcagagctttcccagaaacctcccttccttttcctttctgaagtcagagtgttcctaggacaacattttggttcataaaacattttgtaatgctgtgactatctcagcatacaggatacccctctcacttcaatctccttgttttctaataaaatcaaacatttcaaaaatggcattaatgtaatggatgaaagagttacacttcaccatcattttaagttaaaaagaagtatttgaaaaaataaattctgattctaatgctcgttcttgaaagtttgcttcaagcaggaaaacaactgcttttcagattctctttttcacctggcttttttttttaagttcttaagtaaaaataaaaaagttccaattgattttgtaagttttgtgatggtaaaacaagatgtggagcaaacatttcagaataccaaacagagttaattaattccagtataagctcctcacatacggccagagcttgcaagcagatgtgctggctaaatatctcaggtcaatcttagcacattattgaaagtaacctcccattcctcagaaaagtctggcctgcagcttacaaactagagcaaacaacttagacacatggaaaagtagaatttaacatctcccgatttccactctccatttatttccaaaccttccatctaaatcggaagaaaaaaaaaatgccctctagtcacacataggccacactaaagtattagccactaaaataaaagatgaggaagcaattttaaatgcagtcaccacaaatgtgttttgggaactttcaccttgtctctcataaactagaaagtgtacttcatgttccttttggtttcgaatgagcaaggcatttcaactattaacatttcatttccaccacgtgtctgtttcagagctagcagctggcctatttattttgctagctggtgatagaattaaatacagagtctttgaaaacatttacaagctttccctctaaccttctgtgtactttccaaattaggctactttgattgttattagctaaaggtttacgtactggaatactaacactgttaccttcagagtaaattgtttatagctcaggtgcagtttagaacattttcctccatggaatactcttgagattgaggagaagaaagttgaactggttcactctggatcaacaagtttcctttgtgagtcaaacaatattaaggccacacagatatggatgcagtcagggaaaccagttgtgaaaatagttctagtcctctacaaaaccacaggcttcctttgtgagctcccaaatgctttataatctcaaaatcaccatcgtcataatgcactcctaagatttattctttgacactagcgttttgatgtggaagacaaggcatacgcctggaccccaggccagtgtgggttcaaatcacgtctccttcacttatgatgagctagacggtcttaaccaaataacccaagtctttagtttcaaaatcagcaaaacggaaatagtaatttccacttcatagctttgtcgtgagcacttgcattgcacagatgctcaattagtggtttgggatgaaatcaaagatccttcatcactataagcttttctcaatctcttcggcccacaatatcactcatgaaaagcatccattcattctttcattcagtcaaaaactacctattggccctactggagataagaagttcctcctccatagattgtgatgatggtttcatggatgtacacctatctccaaactcatcatgttgtaggcattaaatattaccattttttgtatgtgggggaaaaaagaatgggaaaaaatgtggccccttctcttaaggaatacacagagtacttcagggggtcacagatattaaaacgggggaagggagggtgggaatccaaaagagtgaaaactctagctgctccacagagtattgtgaggacccagagaaatgggccaactcttcctaggaaagtgaggaagagtttaatggggaagatgatatttgaactacggttgtgtgtgtcttttaggtaagaaagatgctcttcttgagcatcataagcaaggagaacagcacagaagaaggtaaggagtggtgagatggattgctgtagtcagtgcagctacagaagagatgatgctgcctagggggtaaaacgggctttagtatgtcaggatcttttttttttgagacggaggctcactctatcgcctaggctggagtgcactggcgcaatctcggctcactgcaacctccgcctcccaggttcaagcaattctcctgcctcagcctcctgagtagctgggattacagacaggtgctaccatgcccggctaattttttgtatttttagtacagacagggtttcacca[136 bp omitted]gtgacaagaagccactagaggattttagcatgaaaacaacacaatcagatttgtttttaagaaactaattgcgttagcagaggggaagacagagtggaacactaaaggacttgtggcaggaaacccagctaggtatagccatagttccaaggcagagaagacagggtctgggatcaaagcaaattaaggcagcagaggtgggaagaaaaatgtgagagacagtttcagaggtgaaatcaactgaattcagtgactggctgcagatgtctaactgatatagggcaggcaggcttagcctgggagggttcttggcttcacccaggaaagaattcaagggtgagccagaggtgagcggcagtgtgcagcagaggtactgttccttgtagagcagggctaactcataggcagtgtgtccagagcagcagcatatgggctgttggctagctgtatttatatctacttttagttgcatgcaaatgaagaggtgggttatttagaccttttagaaaaggggtggggcatttctagatgcatagaagataactttcaggtcattcccatggcatgttgccacggcatttgtaaactgccatggcactgctgggagtgcctttatgttaatgagcagtgagggcaactggaggtcactttcatcaccatttgctggtttcagctggcttcttcactgcacgccctgttttgaccacatctttctccaatcagtgggttgtgactggtgctcagaaaacaagtcctgctgatctcctacctcataaccttgaaaataagttggagggtgacactaataaccaagataaagaacaaaaggaatggaacaggtttgtggggaaagatactgagccgtgttttagacatgttgcatttgaaggaccgttcaggtgaagatgctgagtaaagttggaaatatggatctaggaatgtagaaaagtacagattgaaacgttaacatctaaaaaaggctagagcacaggagattaggataagcattagccattatgaacaggagaggaccccaataagagcatgcagagtgagagagacccaaagacagaaccctgaagagtccaggattcaagtgatgttcacccatatacgtcagtttctgcttaacgatatgcatgctgactttcatcgttacttatctggattgtgaaaacatgccctgtttccccagacaaattaaaaacataaggctttatacccactgcttaaagagcacctagaaccataataggtaaatagaagatatatgtggaattgaaatagaggaaacttacatggagtagaagaaaacgagcgttcgattaaagagggcctttagtaacagcctaaggaattttaacttcatcctttagataataagaaaacaaccagagttttttgagcatcaaatcgtgtcacaagaacagtattttcaaaggtttaagtatatgaggtaacatatatgttaactatctccatttattcattctacaatgtatatatatttcaaacaatatattttacctaataataatttttgtcaatttaaaaaattttaaaaacaaaagagtggtatatggagggatgagagaaaaacagactctgcagggaaggaatccgttacagtctgactgtgggaatcaagccactggttctcaggcaagctacagccaaaagggatataatccatctagctaaatgaatgaaacaacatacgtgggtcctgaaatgtttttcttaaaatgtaccccaccttggct[136 bp omitted]gggctgaggcaggagaatggcatgaacccgggaggcggagcttgcagtgagttgagatcgtgccactgcgctccagcttgggcgcaacagagcaagcctccatcgcaaaaaaaaaaaaaaagtaccctacctttgacttgccaaaagagagataaccataataaacccaaagactccatgaaaggcaagtcagaagtgggcacgtagaatggggaaagtacactagggtctctgggcatctaaaatgattctgattttgaaaaatatcaatacacaaaaatactggtgagggtaagatggccaacacgcttcggacagatcacagacactttgacctacttgggttttaatcattcaggataacaattacgaccacgatcaacataacatggtggatgatgaagagctggctgaaaacatctgaaagagctggctgaaaacatctgaaagagctgaaagatgtttggcctgtatcaatgtggcccagctctgggatgtagggatctaggcagatttacaaaataaaaagcagcattgtttgtctgctgcctcccaccatctgttcttgccccaggttagtggaatgaaacaaactctctgggcaagatattgactcacatttttcaaacgctgactcctggtttggatacagagctgaggtcagaattcttaggtccttttccagccaagctgattttaggacaggcaagcaatcacaaaatactcttctgtgcaataaatatgaaaatacttaacctccttagggtattatgaagcataaatcatgcctttaaaagcctgtgacaagctgaaatgaaaagcgttcaaagtggagaaatacaatgaaaccacgactataagcactcactgaattttgagcagacagttgtactattaatttaatgaggtttatggttttaaaagtattcatcaatagcaaatatcgcgttgcttaaatattccattactcgatcatctgtctaaatgcgctctggtctccaacattgattggcttgctcaaaatggctagtttctttctctcttttctttccccaccaaaagtactgcttaaaggagccattaacaagaggattcactcgtcagggctacaatgacttgcagctggaagatccacctacaaatatacatccattcataaggctgatacaacagctttcagggaggggatgtgcatgaaatggacacaagcgaagagtaacaatggcagggattatcttttaactggctcatgagtgaaaaaatgaaattgcagacgtctgacaactgtagctttttcagtcagtacaaattaaattataaacctacagctacacatttactctttatgagttgatttcatgttaggcctcaatagttacttattcctggtacaaacgtaaaccagcagttgtgccatttaagagattagttcaattaatactgtccctgctaggctaggccttatatctataagcaattcagtgtctggcttgctaattcatactctcactttgccttttctttgtcagtcaaagaaattaagctggagatctcaccaggccggccactttcccagtctcttagacgcctctgtttgcggccattgcagtgattccatgatgaatttcaatcattagaaagttcttcctaaggtaaaaagcagagctggaatcaactggtacttattctggcctttgaaataaggtataaaaagcccatttctcgctgggtgcggtgggctcatgcctgtaatcccagtactttgggaggccgaggtgggcagatcacgaggtcaggagtttgagaccagcctggccaacatggtgaaaccccaactctaaaaatacaaaaaattagccaggcatggtggcacacacctgttgtcccagctactcagaaggctgaggcagaagaattgcttgaacccgggaggcggaggttgcagtgagccgagattgtgccactgtactccagcctgggtgagagtgagactccatctcaaaaaaaaaaaaaaaaaaaggccatttctactgtaaaacatttgatcatctctcctctacaacacactacccccctcccccacccacctcttaaatatcgtataaatgcaagtgtgcgccaaggaccagcaactctggcatcgtctgagagctggtcagaagtgctgactctcaggtcccaccttggccctcctgaaccagtatctgtcttttaacaagatccccaggtaattcattggcacactaaggtttgggaaacacggctttagaccagtggttggtaaacattttctgcaatgggccaggtggtaaatattttaggttttgtaggccatacgtctctgttgcaactactcaaaactgctgttgcggtgcaaa[131 bp omitted]aacccccgtctctattaaaaatacaaaaaattagccgggcggtggtggtggcgcctgtagtcccagctactcaggaggctgaggcaggagaacagcatgaacccgggaggcggagcttgcagtgagctgagatcacgccactgcactccagcctaggtgacagagcgagactccatctcaaaaaaacaaaaaacaacaacaaaaaaaaccatagtcaaacaaacatggctggtttttgtttgttttgcttttacaaaaagttttatggacactaaggtttggatttcatataattttcatgtgtcacaaaatagcttttgattttttttcaaccatttaaaaatataaatgccattcttggctcatgacctgtacaaaaacgggataaaccatagcttgctgatcctagctctatactctggcacttcacatgatatcatttgctggtttcacctgggcctggtcccaattctagataaggtattccagttcattaatgcagcatgcataactgaatcaaacaaaacagatgaatttttaacagtactgagcagagcaagaccattatttctcatgatttgaacatagcatttgttttggtgaagaccaatgcctaacaaaacacttattttaatgtagcagcatacaatgtggctggacatttgtaaacaattaaaaaattgatatcagtttgcaaaatttacttatatcttcaatagtcatatcttctccacactataataactaattgttatgatcactactgtacttactgccatataattttttttttttttttgcggtggtgtgatcttggctcactgcaacctctgcctcccaggttcaagtgattctcctgcctcagcctcccgagcagctgggactacaggtgcgtgccaccatgcccagctaatttttgtctttttagtagagatggggtttcaccatgttggccaggatggtctcaatctgctgaccttgtgatctgcctgcctcggcctctcaaagtgctgggattacaggcgtgagtgagccactgcacctggccaaattttgcaattttttaatcaggaaagcaccatcaatactgcttcctggtggggtgaggaggaagtctggagctggaacacattcccacacattaccattttttccttttcaattctcaccccaaaagtacccccggcatatagggaaaataaaaagacgcatggcaaagggtattctgcaattaagttcctctccacatgggattgttcaaaccttggtcaggatggacaggggaaatttgcagcctaaatatagtggtggcataaagtaggtcatttccagaaccatggaaaataccactgggaaaagggcaaaaggaaggaagtcataaagaagagttgacaattatttctataatggtttccaatctggatactcccttacagcctatttaagaaacatggaatcggatgatttgaaacatatttcctaactctaaaatttggagatttgttattagtaccattacctacctagttatatgtgctcaaaggctgggaatcctctctgattcatcccttccacttggatttcccttcagatccatcccccaaacctgccgattcctcctttataatccctctcaaatgtgtcccctgcttttcattctcattgtcaccatcttagttaacacttcacccccaatttactgcagttatctccattggtcaatgacgtccatgatgtttcacattattgcccaatacaatcatagtgaatcaatgatttttttttttttttttgagacggagtctcgctctgtcacccagggtggagtgcagtggtgcgatctcggctcactgcaacctccgcctcctgggttcaagcgattctcccacctcagcctcctgagtagctgggattgcaggcgtggaccaccacgctcagctaatttttgtatttttagtaga[157 bp omitted]tcagtaatttcccaacacttgaaatgccggctccatatcctacaagcatttcagtttccccaaagctatcacccactcctccttcgcttcaccatggctggcctcctctccatctccagctcccaggggttgactccactcctgtgcctcatcctttctcacatgcttccttcatcacctccaaactggagttaacatttcaaactcaggccaaatgagaggcgtgaagatgtactcaaataattactaatcctgagtatgaaggggcaaatgctaagatgaatacaacataatgcaaaaagattaaaatgagacaggacctttagaaatttagtcaaatacggctgggcacggtggctcacacctgtaatcccagcactttgggaggccaaggcgggcggatcacgaggttgggagatcaaaaccatcctggccaacatgatgaaaccctgtctctactaaaaatacaaaaattagccgtgtgtggtggcatgcacctgtagtcccagctacttgggaggctgaggctggagaatcacttgaacccaggaggcagaggtggcagtgagccgatgttgcaccactgcactccaacctggcacagagcgagactccatctaaaaaaaaaaaaaaaagaaactgagtcaaatatccttatatcctttgaccttgttaatcacactcctgatcgtcctcattcttttctgactgctacttcacaacacccttcctgtaaataatggggctccccaaggcgctgccctaagacgctgagctcttctccatctatgctcagcaccatggcttttttttttttttttttttttgagacggagtctcgctctgtgccaaggctggagtgcagtggcgcgatctcagctcacggcaagctccgcctcccgggttcacaccattctcctgcctc[134 bp omitted]ggcctcccaaagtgctgggattacataccgcgcctggcaccatggctttgattaccatccacaggctgactctcagatctaaaattccagtttataggtctcccctgagctccagattcaaaagcagcatactatttctgacacacctaagctgagagcaccccacgtgtcttcgaactcagtgtcttctcactttaccgccacacacgtttttcttcctgtgtgccctatggcagtcaaggccattgtcatctatgcagctgcctgaggcagaacccaatcaatcactggtcctactacttttaaaacctcccctccatccatccacttctctccctatcttctcatcctaaccactccagtctaggccaacatcatgtcatgactgaactacttcaagccacctcctgactggtttccctgtctaccatcccaaccccgctcctatccatcatctacattactcccaagccatagtttctttcttttaagatggagtctcactctgtcacccaggctggagtgcagtgttgcagtctcagtgatctcagctcaccgcaacctccgcctcctgggttccagtgattctcctgcctcagcctctcaagtagctgggattataggcatgtgccaccacgcctggctaattttttgtattttttgtagagacggggtttcaccatgttggccaggctggtctcaaactcctgacctcatgggatttgcccaactcgacctcccaaagcgctgggattacaggaacaagccactgtgcccggcctgtatcttctttattgaaactttagtggtcaccttggagcaaaagaagtgaatagtggaggtcccaaattacagcactgaggggcaagcattgtctccaggtggtatagatgagtagcagtggtgtggtatattattagcagccagactcctaagaacgtgtgagatatcctcttgggactcattaaaacatttagagaggggagtcagtcaggtatggatgataatgttaatatggcctcagaggcatcaacgtaatgcatttatagtcaaaagctgatgaaatgtggagacattctggttatagattgaactaagataatctcatagataaaggggctacagggtgctatggagagttgctcagatgtttggaagatactagtcatcatggcagttaacatcaaagaagataatcatgcccttctgtaatgtgtcctccttgcaggttaccttcaaacacaggcttgggaatgtggaggatcatatatccaaaagggcaaccaccactattcttaggagttgctaatcttcacgtttggagctgaatgattaaatcaactactgaaagcagccatagggccttcaactcttttctctttcccagaacagaactagagtcactcattcattaagcatctacaatgtacctactatatgtaagggagagcacaaagatagaccacacacagtccgcatccccaaggaaatttaaattaagcaatgtgggacagtctgttgcgagttcatgtggtatgatattggagggtaccactaagctcacctaataactgcttcttaacaaagaaatcccttctagggctcccccgagccacagagccattccccttgagccatagagccacacagagccactcccttgagccacagaaccacagtcattgtccaactgtgcaataatctgaggccaaggtaatttccaaccctccttttccagagttctcttcttcctaactcatttatattatttctactggctcctctgtgggtctggaacccctactcttctctaaggagaaatgaggaaccccacctaccataggtgcaaaacattccaatgttcctttgtatttctctactaaatgacaactaaacagaagctgtttgtctggtgggctgacatgatcacaggcaaggcggaccatcagctcttattaccaaatacccaatatacacccttcctttttggcccttcctcaaagttttccactttgcctggcccttttcatgaataacttcctgtgtcatcatgtgacacgacgaatgatttctgtcatcgtgttcattcatacctatccagaacataccatagcactgtatcatacctagtttgacacaaagacctccctcacacttctatttcctgtccaccagtcctcatcccattctttattcacacacactttcgcacattcttctctctttctctctctctctcctttatagagacagagtcttgctatgttgtcccaggctggtctcaaactcctgcctcgagcggtcctcccactttggcctcccaaagcattgggattacaggcatgagccacccctccctgtctgttcttctcttaattacttcttcagctctaacaacgcaaagcgcatctgctagcccttggtttctggattatcctgcccctctctgccctagtgaatcttaagaaagttcacaatcagtacgacaaatcatgtgtgtcctgactagcgctgatttggtggaattatttccagtttagatctggtccttccttaattaataataataaacctcagttaaagttgtgtagcattttccatagcagtaacacaatgttaatttcatcttgagcttggagaagtcagctaaagtcctaaacctcaagatctttttatatataagggagaagtctccagagatggtgcatccatgagcacatcatctttactaaagaaaagcaaaatatatttatcttctatgtatgcacacaaacatgtattttttcttcctttttttagtgcaacttcctgacctctgaaaacaatttctttaggatactggctgtaaatatttgcacggattgttcaatagctggttgtgcaaagggagacaggctttttgtctttaccccggaaaagaattgaaacagactctttctttcaaaagttggcagagatatgttacagaggggtccagctcatttgtagaagcaaacatgttgccgtctaacacagattgatcaccagctgggaagcaagtcattccaccgtaggttcacaataacactggctctctgctgagctgctgaccactggtgacagattgatgtgtagttcgagtggagaagctagctaaagagaacttagggaagctgagcaggttgcaagtgtattattcatgcactctctgcccagaaaaataaagttccccacctttctgacctaagtttggagaaccgttagggactgagtttgctttgtgactttgaaggctgcttacagctttccagagcaacataaaaaatgaatacctattggcactccaatgaaatgccaaaatccacaaagagaacgaccaaggaacatttcttttttccttttcccactgcgagtgagaaagaagagacatgatatttcatgtcactgctaaagagtttgtttggtaaaaaacaaatgaaaaggtacagcttgttaacaccactcagaggtagacagtccagggtctcagaaagaagaatggcatgcccctgggtttcttttagaatgcgaagagtggtggccggggagggggggatggtgggggagggggttggggggtgggggtgagggctcacggaatgaagagctttaaaacaccacgcaagcggggaaggcatatttacttaagaaaactggtacctaagttgtaaatcggaataacagatcaagcaggtaccgtgttttataagtttgagtcattaaattttccaagattctgcatgcttttcaaaccataaaagacccacttccaaactattacccactttttaaaccatgaagatacattaagcacactactttttcaatagcagtttttttgcacatcttttctatcatctttccttaaagaatatacatttttttctttttttctctttttttttttttttga[317 bp omitted]aaaacagaataattacatgggggccagggactattttattcaccatggtgtcactaaagcctagaagaatgcctggcacatagtagatcctcactaaatatttgctgactgactattcattggaagccaacttagcaacactgtgctttattattctagctcagatttaatgataaaatttcatgagcattttcccacaactttcgaaaattattttaatgaagaaatacaaacataactgcaccatttctgctattaccaccacgtccacagttgaaactattagtgtgaagtgaaagctgaatataaagaagaaatttagcccaggggattaatttcttcaaggctggtgaggaggaggaagcaaactactgttttccttttcacgggagtgctacacgggttactatccacaaagatagaaaggaataaataagtagtagttaatgatgaggagaagcaacagtttttttggcagtagtacaaagccaggaaatatagcagtttccagagagttgcatgtgcttttcagtgaaaaggtttgagatagcacttcctaatgaaatgccaaaatccacaccaagaatgactgagtagcagtttttttccgttttcccactgagagtgagacagaagatccgtgatgtttcatgtcactgccaaaacagtttgttttgtaacaatgtatgaagagagacagcttattatgccacctgtattgcactatttgttagtattttaataggtaattaatcttgatttgataggatttaagatttctattttttggcacatatgctcaagctattatgttataaatctcaaacatttcagcaaatgtcatcctgattgttccctactgcatagaatacgatcagtgaaatattcaaggtcaagaacttggattctttacccaccgtattcaggaaaaccaatttattgttctgtctcagtaaagaggggtgatttctttggggcctatattatattggcagtcaatctagaaaacttataattacttttaagcaatggaggtttggtaagtgcgttaatctgttcctgaatttaaacacataccctttagctattactatgacaaaacttcagagttcaacattttaaattacaagaatgaagtgtgtgcacaatacgttagaatggtgcacaagagtttttaatataaaatcaagaacatgtctttgcatttgcctggggataaaatcttaggaagattttgaggagttgttcttttgttttttcttttttgagacagagtcttgctctgttgcccaggctgcagtgcagtgacgcaatctcagctcactgcaacctcggcctcccgagttcaagcaattcttctgcttcagccgccccagtagctgggattacaggcacctgccaccatacccagctaatttctgtatttttagtagagatggggtttcatcatgat[135 bp omitted]ggtttggcaaattaatgttctcatcaatttattggaataaaaaaattgaatgatgtttggcattaaaccaaatcattacagatcatttcaactgaactaagttt[133 bp omitted]aactgtctctactaaaaatacaaaaattagctgggcatggcggtgtgcgcctgtagtcccagctacttggaaggctgagacaggagaactgtttgaacccaggaggcagaggttgcagtgagccgagattgtgccattgcactccagcctgggcaacagaatgagactccatctcaaaaaaaaaaaaaaagtttgatcctcattattcatggattgcatatttatgaatttgcctacttgctaaaacttatttgtaacccccaagacaatatttgaggaactttcagagtcattcgtgaacatgcacagagaggcaaaaagtctgagtcgcccaacccgcacactcctaactgaggctgagcaaggcaacgccctgccttctcgtttcagctccacatactgcaaacaagtgtcctttcggcggtgtgtttagtctttcacatttctgttgttgcttgttgtgattctgccgtttaaaatggccccaagtgtactgctaaagtgccgtttggcgttcctaagcacaagaaggctgcaatgtgcgttacggagaaaatacatgtattcggtaagtttcattcaagctgttgcccaggagttcaatgttaacccactatctatctatacctatctatgtatataaaataatatgtccttaacagaaacacttagaagcagggtttcattaattggttgatgaaaatgctatgagcttgagggaccctaacgctgtatttcccctaagaacagtggttcagtatgcactaacttggtgttcacggtgactttacagaacatgagcgccacaaatgaatgaggactgactctaattattttcagaaatgaccttaatacaaaatttttgcttctcagagaaagacagatgtttttgcttttgaaaggtaagggtcagttctctacattattaaaaaaatatatattactgcaatcttttttaaaaagatacatagattaaaaaaatttctaaaatgacaataccaagtgctgacaagaataaggtgcaactgaaactctcatacaccactgatggaaatgcaaataatccagccaccttagaaacagttgatcagtttcttagaaaactaaacatatgcttatacaaaccagcaatcctactcctaggcaggattacccaagagaaataaaaacaattgttcacacaaaaatccaaacatacccatctgtagtggctttagtcaaaactgccacaaactgaaaacaactcaatgtccttccactggtaaataaacaaacaaattgccgggtgcggtggctcacacctataatcccagcactttgggaggccaaggcgagcggatcacgaggtcaggagatcgagaccaccctggcttacacggcgaaaccccgtctccactaaaaatacaaaaaattagccggacatggcggcgggcgcctgtagtcccagctactcgggcggctgaggcag[137 bp omitted]taagctattccaccacaataaaaaggcacaaactacggatgtatgcaacaatgtgaataaatcttaaatgcattatgcttagtgaaagcagccagatacaaaaagctacaaacttcacaattctatttatattccattttggaaaaggcaaaacttgagggacagcaaacaaatcagtgatgcccaggggctgggagtgagaagagggtctacctgtaaaggggttgaatgagccaagcacaggtggcacacacctgtagtcccagtaacttgggaggctgaggctggagaatctcttgagcccaggagtttgaggccagcctgggaaacatagtgaggccccgtctcaaaaattaattaaaaaataaataaaggagaatgaaagaacctttgaaggtgatggacttgttttatatctcaagtatatatatcaaaactcattaaattgttcataaaaaaaagatgaaatttgctacatgtaactttttttttgagatggagtctcgctctgtcatccaggctagagtgcagtggtgcgatcttggcttacagcaacctctgcctcccaggctcaagtgattctgcctcagcctccctagtagctgggaaaacaggtatgcgccaccacgcccggctaatttttgtatttttagtagagatggggt[135 bp omitted]acactaaaaaaggtagtaaaaaataataatgctgtaatgatagacattccttcaaattctccaagacccatatatacggatgtgtgtgtgttagagatagaatctccctatcttactcagactagcctcaaacgatcctccagcctcagcctccctagtagctgcgaagcatgcagctgcgcctgacttcctctaatttttaccgatgttcataggcacatttttatctagctataatataaattgatgatttgttttattttataaaaatctaattaattctgccattctagcaaagaccagcatgataatctggcaaggtaggactcattgatcaatttcaagtcagcacttttctccccattcacacagcagtatttcttaagaaggaattttatttctcggtggtattctcagtattttgtagacatacctgctcttaaccagcaatgcaggaagtccaaatgacatcctgaaacaaggcctcttttgcagccttcctccataagaggtcctgcctttttgtccagtaacacaaaaaagatttgccaagcatggactgtgttctgggccctgcgctcagtaccaggaacacaaaaatgaataagacagccttacttatatcacttcctcactctatcttaaagcaatggtgcttacacaaacttaagccctcaaatcttctggcatatatgttaaaattatctcctttgtttataccgtccctcccttccagcatttatcttgggaattattcactttttccagatctaatccacaccataatcccattaacaacttcttcaagctagacttggagtggtcagaacttgattccacatatatgtatctctctgtggagaaaaaacaggatcccataagtcaatgccatttcgtctcatctttccatgtcacactttgttactaagtgtgtgatctacggcgacagacatctcagttcgagaacttacacaaggcatcatctccacgtttaatgtaactttccaaagtaagcactaattccctttggaaaccatagtttttaaaatttttctaaataaaatggtacctctgatgtagctatgacccctgctagggttcgtggtgtctaatgaagtgaaaatattatatactttgcattcagtaaaagttcctattccaagagatataatttaactcctatgatatatatgtccaaattatttttataactttataaataaacccatctctaagttctcctttcaataaaaaatgaatatttaaagaaaaatagaaaaatacccaagttgctagatttttccaaaaatgattatttttgaatacttcataaacaaatgtgcaatttaaatatattcatatatacacaaaaatatacatatatacagagagagagagagagagagatggacaccatgaattcttagaaaacggaacaaaagtttcactgcttagaaaatttgagtttgatattttgcttcctctttcttatttggtttaatttgagctgcatctgatttatgtttttctcttaatccaattaaattaccttgatggtttcagttaaaacatggaaggatttattgcaatctctcttaatataaagtgcatgaattgtcctactggagtcaaataataatgtgtaactatgacatacattccaatgacaatttcaccattatgacctgagatatgactcaaactctagttacttagtaactataacttaatttagtaacttctttgacttttttttttctgatcatgttttcaccctggacactccaagtacctgacagcttcttggtggagcccatctcttatctaaaaatacctgaaacaattagctttattttccctgctttcaaacacaagagcacttatgagaaagaaaattgacatcggagaaaggtgggatgagagaaaaatctcttctatctttaatgaaattagttaccaaaaatagaaaaaaaaaaatctttgctcaactagaagttaaatgtgtgtttctatttccgaacactagttcttactcaactatgatacagcctgtgagaaggaattagtcctctacaacacactgccactctgaaaggttcaggtaggtggtaggaagtgcccagctttgggatggtgctgaacccgatgccgcagaagccaaatgaacacttggggcaaatggtcccccagcctggcagtagctttggctctcggtgtgacaaagcagaacagctaggggttctcaggtgtaggcgagcacctgaaacccttgaaaggttgtcacatgacgggtgttctcaatgtataaacttctacactgccttggttgttgatgattttaagattaaaaatctacttgggaagttggataacaaagtatcccagtaggatggcccttgtttttttttctttttagacagagtctcgctctgttgccaggctgcagtgctatagtgcagtggcgtgatctcggctcactgcaaccctgcctcccgggttcaagctattctcttgcctc[225 bp omitted]gtatggctagaaaatggtgtggggatccgaaaggttaatttcctatgactagaaactcactgaccctggttcatagggtaggttcatccaatccactgtaagcctccaggaaaatcaaggaagatcattatgaatcagctcagctgctactgtgatagtaatctcaccatcattatgtttaccccatggagaaaacactattgtaattaacaccaatttataatctaattgtgggacagatggtgaaggatacctaccatattcagatctgaattagacaggaaggtatgaactgtatacaaccttcaagagcactttatacctcctgtcactactcatctttttttttttttttttttttttgagatggggtctcactctgttgcccaggctggagtgcagtggtgtgatctcggctcactgcaacctctgcctcccgggttcaagcgattctcctgcctcagcctcccgagtagctgggatcacaggcatgtgccaccatgcccagctaatttttgtatttttagtagaggcagggtttcaccatgttggccaggctggtctcaaactcctgacctcaggtgatccacccacctcagcctctaaaagtgctgggattacaggtgtgagccaccgtacctggctacttgtctttcttatggaggatttttaataactatgtgttgagttaataaataaattgtgccatgagtctcttgctctcctaaggggacttatgggtaagagtctgtaaaagtcaccagtctggatggggaagcatggatggcaattgaagaagagggaaggcgaggctctgggaaaccgctctcacatggcttcagacactggtgcaaaggaagcgtttataagaaactatgtcataaagttaaagtggaatgactatattctaaatatgttttctacattatatatacatcattaaataaattgaatatcatatttgattatttcagctatagtcctaaaagtatacacagtagtccccgcttgtcctcagggatacattctaaggtccccagtggatgcctgaaacctcagatagtaccaaaccctttctcaatctgataaccaagagggctaccaaatgactcgtaggccgggagcacgtatggcatggagatgctggacacagggatgattcgtgtcccaggtggaacagagcaggatggcatgagatttcatcatgctacttagaacagggcataatttaaaacttatgggccgggctggccgggc[137 bp omitted]tggtggcaggcgcctatagtcccagctactcgggaggc[143 bp omitted]tttccatttaatatattgggactgcagcagaccatgggtaactgaaaccacagaaagcgaaaccacatataagggggaactattgatttgggaaagaaactgttctagggggcagaggatggatcatcctctttggagacaaaaaaaattatcttacactcaggaatatattcaggtacaatgtttttacaacagtagattaaacagtttaaagtgggcacagtggctcatgcctgtaatcccagcgctttggaaggtcaaggcgggagcatcacttgaggtcaggagtttgagaccagcctgggcaagacagcaaaaccccgtctctacaaaaaattaaaaaattagccaggtgtggtggtgtgcacttgtagtcccaactacttggaaggctcaggtgggaggattgcttgaggttgcagtaagccatgatgacaccattgcactccagcctgggtgacagagcaagaccctgtctcttaaaaaacaaaacaaggctgggtgcggtggctcacgcctgtaatcctagcaatttgggaggcc[135 bp omitted]gaggc[149 bp omitted]ttggtggctacaagaaaaggcacagcaaggaaaatattttggtatcttggtgtaaaaaaaagcacaaatgaaaatattacaatgcaataagaatttttaaaaaactgaataaaaacagtaagattttgactatggtatcaggaagggaagaaaaggagaaacttaaaatatggacaggaatacagacacttcagcaacagtcaatgtcctctgcagacagtacatacaatattattcacaaagtgggctaactctgtaacagtcttccagccaagagtctctgaaaattatttctaaaactttacaacttgctactataagggggaggtacgcaaccaataagtctaattaggattctgaccatttctcatatgcaaaggcatatcaacaaacccatctgcagtgtacagctcatcctcatctgggatctgggggcacaatttactctcccagcacaccctccctccctaacctgacgatccaactgtgtttcacccaggattcagatcctgggaggaatcctaactatcagggctgttaagcttttaaatacgccaccctcagagaaggccctcactagatgggtaggggctgggtgtcatgataagagaattcctattttcccacggaaatgaattactttttaaaaaaacccatttgctggtgaaagggaggagagggaggaagtgaggctaagcaagtgtatttggggggtggcagatgaagcgagtcttgtgggtctcaggacagtctttggaacagaaattacaaaaactaatttgaaacccagaggcagtgaagaaaaggcatggaaaccaaatgaaacaccatttgatctttggcctctctgatctgaaactgggctgggcctccagctgagttcactgaggccactgaacagctgtccggtgataaccactttcatagttgtcagcaacatttgcttcaagccagtaccagggctgttcccactctgtggagatggaaaaagagtctatgtttcccttcatttcttcctctgcttgagccatcctaaattaggaaatcatctggatttgtaaaaataatcacttcttggcatgttcacagaatctgctgaaatgttatttcagaaaagagactctgaatgcctggaggtcactataggaaatgaatctggcaatttgaaagtgcacctgctgaagttctaggccatctcagcattcaaataatttatccatctttccaaacatcttttgtgtcttttatttttaaaaaacaaaaaaaaagttctaagttattacacttactatgaatcggaaaacagccctgcttctttagatgtggattctggggtttttttctcctgcattttttcactattcagcaaacactcatttagagtccgccttagacacagaactctgctaagtacgtatgcatcttgcttaggacagctgtggctgcaagtagcagaaaatgagactcgaactggattaaacatcacagaaatgtgtctctcatggtaagaaatgcagggttgctctagagttggctaatgctgaggttctgcaaagtcatcaagcagccatcattctttccatctcgttactagtttcctactgctgctataaccaattcccacacacctagtgccttaaaacaatacaaagttatcatcttataggtccagaggtcagatgtctgacgtaggtctccgtgggttaaaatcaacgtgtcagaaaggctgtcttcctttctggaggctccaggagaatccatttccttgcctttccagcttctaggggctgcccacactccttggcttgtggccccttctatcttctaagccagcaatgactgctcgagtctctcacatcacatcactctaacactgactctcttgctccctcttccacatttaagaactctggtggttacactgggcccatcagagaatccaaaactctctctccatctcaaggccatacccttccttagcacatctgcaaagtctctggccacgtaaagtaacacatcttcagattacagagcctaggacatggatatctctagtgggggctataattctgcctaccataatctctgtgctcttccagcctcaatgagggctttgccctcaggctggctgttctcatgatcataaggtactaattagagaagtttcagatgccacatccagacatactttgtagaggaataaaaaaggtgagacacctctttctggtctctttctttctaggaagaaaactttagccagaggccctagagcagattttccttcatgtttaattggctgaaacgggttacctgcccattatcaatccaatttttgacaaggagaataggttcactgtgattggcataggataagaatttggaatggatgttggagagtcagccatcatattcactataatgtagcaaataccaagaagggcagaaagttactatttacagaatacttataactaaaggtccagtacttaaaccaatcttgctaagaaaaccaaggctcgtttgaattttactatgtattctagttatggttacctctgcatatactattatatatggaggagtaaatatgctggcttttaattttatttttttgagatggagtctcgctctgtcgtccaggctggagtgcagtggcgccatcttggctcactgcaagctccgcctcctgggctcacgccattctcctgccttaacctcccaagtagctgggactacaggcgaccactgccacgcctggctaattttttgtatttttagtagagatggggtttcacc[139 bp omitted]tgttgttttctaccacattcttcaaaaacacatcaaataagtttttaaaataattcaaaagtaatcatgactttgagaagaccaatgcatgacttgctagaaaatatacgagaggttctaacttcgagtttgctctcgtgctcttgttcctcaaagaaatccagcactcccaatgcaatatgaagtatggatcagagaggctgcttagaggactgactgctcttccagatgacagtgtcatatgatgaacgaagctgaagccaaacagcagaggcctgaattatataggcgtatcggccagggtctgatcaggcgacagaaatcactccagttatttaatttttttttttttttttttgagacggagtctcactctgttgcccaggctggagtgcagtggtgcaatctcggctcactgcaagctccacctcccgggttcacgccattctcctgcctcaacctcctgagtagctgggactacaggcgcccaccaccacgcccggctaatgctttttgtattttttagtagagacagggtttcaccgtgttagccaggatggtctcgatctcctgacctagtgatccgcctgccttggcctcccaaagtgctcgaattacaggcgtgagccaccatgcccggcccactccagttattttaacagaaagaatttaaggcagagagagccattaacaagacatagagttgttaactaggtgagagggtaaaaacagaactctaaggtatcatgggagcagaagagataaaagcaagaggtgaaaattattaaaataaagagcctggacgagggcccccatggaagtgaactcgaaattctgaggaggaggaggtgctgctcaggtgacacaagtgtctccagggtacctgaagaggctgattgtgcaagtgttgaaaaacccgtggactgaattcagccagctgctgcctcagggaaagaactgctgctgccagggtgaagaagcgtatcttgtgtaccacagacgggaagctcacaggaagcaaatgggaaatacacatcacttccttgtatggagcctcgctctgtcgtccaggctggagtgcagtggcatgatctcggctcactgcaagctctgtctcccaggttcactccattctcctgctttaacctcccgagtagctgggactacaggcacccaccacgacgtccagctaattttttgtattttcagtagagatggggtttcaccatatcagccaggatggtctccatctcctgaccttgtgatccacctgcctcggcctcccgaagtgctcggattacaggagtgaaccaccacgcctggccaatatgctggctcttaagcacagaagagttgagctgaaatctgttgctttctaccacattcttcaaaaacacatcaaataagtttttttggcatctagaaggatgctgcagctttgcagcatctagaactcgctactggcagagccgaatagagaggcagctggcaagacagaaatgtggcttgcagaggccgagctccagcatcacacaggagggcacagaaggccatgtttggggttgagagacaatggcttcataaagggcacaacaagaaactatcctgtgataccagtagcaaagtctccttcttttgcagttgagtatacatctttgggaatgataaaggagatgaaggggcttcagagtgtatgaaagggttaaaaaaaactttcatagttaggaaatgcttatttagcttctgggaatgcaactgttccctcactccacaatcatatcacaatatttactagtaactcttggatgttactatcactcccattcctttctgggggaaggaggtagataagcacagtcatatttgtattttgaatatctttttaaaaaattactaaattcagccaggtgcagtggctcacgcttgtaagcccagctctttgggagtccgagacaggtggatcacctgaggtcaggaattcaagaccagcttggccaacatggcaaaaccccatctctactaaaagtataaaaattagctgggcctggtggtgggcgcctgtagtcccagctactcaggaggctgaggcaggagaatagcttgaacccgggaggtggaggttgcagtgagccgagatcgtgccactgcactccagcctgggagacaagagtgagactctgtctcaaaaaaaaaaaaaaacaaaacaaaactactaaattcacaacaacaacatatctttatcatgtagaaagacagtaaatatgtatatggtggttaaaagaacatattttgtcatcagactgatctgggttcaaattctggctttgacacttggtagctgtgtgcctttcgccaagttacttagattgcctcagcctcactttccccagctgttacatgggaataataataatactaacttcataaggtggttgggaagattaaattaattaccactataaaacttaacttggtcatcactgcttttttttttttttccctgtgagtctcaacagcctaggaaagaaaaatgtttccaacccctgctttggggaaaaatatttatagcctttccacagtattcttacctctgtgacagcactgagctcaacgtataagtttttaaataataatattcccaagtgagagttccttacaaccagaactgtatatttttcaccatgtacacagctcctgaaaaaatggttatcttccttgacagatccagacagtgaaccaatccaaaacacaagcagatacacagaaccccacagcgggaggggatggaggcaatccaggaggtcaacatggagaggagtggtttccagtggagggtaggaaggtgagagggtgggcaacagaattacctttttccaagggtgcacaccctccacctaccaccaccctagattctagctcagcttccttagaaaattatgaatacattgttcctttgggtgctagagatagagacagaagccaatataaagtcaagaagagatagtcttgactttctaggaagtgtggattcacagtaagcccaaagggaggctaaactattcaggctcagctgccaggagaaagtgtgaatttgcacagagaaagctggtgcttgtggtgggttagagcagcggtctccagccttttgggcaccagggaccagtttcatggaagacaatttttacatggactagtgggtggggggtgatttcaagatgattcaagcatattacatttatcgcgcactttatttctattattattattataatatataatgaaataattctacaactcaccatcatgtagactcagtgggagccctgagcttgttttcctacatctagatggtcccatctgggggtgatgggagacactgacagatcatcaggcattagattctcataaggagcatgcaacctagatttcccttgtatgtgcagttcacaatagggttcacgctcctatgagaatctaacgctgccgctcatctgacaggaggcggagctcaggcggtaatgcaagcaatggggaggggctataaatacagatgaagcttcagtcagttgcccgccgctcacctcctgctgtgcaacctggttcctagcaggccacgtaccagtactggtccatggccaggagttggggacccctgggttagagaatcaggggaacaaacatgacagtggctggttctatcggaggagaagcacaaataagtctctcactaagtcacacagaggccaagcgcatgagaccttcacctaaggaaacctgaggctgacaagaaaggcagaaaggagcccctggagtgatctaatgaagacaaactcactttgtggctttataagttctaagcaaaccaaggcagagatcatttgtgactaacctgagaagaaaatctcatttcaaccctgagttcttttctctttcaaaaatttccatcaggaggccgggtgcagtggctcacgcttgtaatccaagtactttgggaggccgaggtgggaggatcacttgaaaacaggagtttgagaccagcctggccaacgtggtgaaaccctgtctctactaaaagtacaaaaaattcgctgggcgtggtggcaggtgcctgtaatcccagctactcaggaggctgaggcacaagaattgcttgaacctggaaggtggaggttgcagtgagccgagatcacaccactgcactccagcctgggcaacagagcgaggctctgtctcaacaacgaaataatttccatcaggaaaaaagcatggggaataataaaacatccaatgaaaccctaattataatccttttaataaagtgaaactgtacagggaaggactgcttggggtatgttctggattcctctacactggggcagtatccattgaggaagagtgacagaacgactaaagaaatggactggccaaggggcccgccacacttcccagacaccagaagacagggactcagcatctaggccacagccttataaagtccaaggaataatattcatccaccctggcaggaaaggtaaaaagtaaagcaagagctccctggtcttctaagaagaggggaggggagtctcactgaggaagaatgtaaaagaatcctcatcccagaacacatccctatgcctagctggcctcatggtttacagcttgagcagattcacctctttattagctacgtgatttgaggctggtatttaattctctgagtctcagttttcccatctgtaaaatggtaatgttattaccgctcacagggacactatgagtattaaatacaataatttacgtaaatacaatactttatagtactttcctggaacagagtgagcacccaatacacagtaacaattatgtttgtttcgctatcacagaattactgataataacaggtatccctgcaatctattccattgagactatttttagtattaagttccttcctccaaatcaaaatacttttatttcacccattcaaagtcaaatatttacaggctgggtgcggtggctcacgcctgcactttgggaggctgaggcaggtggatcacttgaggtcaggagttggagaccagccaactcctggttgaacatggtgaa[131 bp omitted]gagaaaccccatctctacttaaaaatacaaaattagcagggtgtggtggcgcatgcctgtaatcccaactacttgggaggctgaggcaggagaattgcttgaacccgggaggcagaggttgcggtgagctgagattgcgccattgtactccagcctgggcaacaagagtgaaactccatctcaaaaaaaaaaaaaaaatttagctgggtgtggtggtgtgcacctgtagtcccagctactcaggaggctgaggcaagagaattgcttaaacctgggaggcaggggttgcagtgagccgtgatagggccactgcactccagcctgggtaacagagcaagactgtctcaaaaacaaaaacaaaaataaaagtcaaatatttatcatgagattgaaatattcttctttgagacaattaccatatatgctccacatcttcctaaatctgattcttaaacagcagcagctgaaagaggcaattattgtaaagagcagttgctttagaaagaaacatttttctcaggcacttctataaatagaaaggtgtggtgagggatgtaaattatgatctgcaattgtgatctttcaattatgacatgcaattatcttagaaattcagctacgataccaggcaaatgtttacacctatatcacaaatctgccgctaggtataatccttaaagtctcaaaattagctccatgcattacacagagtaggctgaataaatgattgcttagcaactttagcaaaatagcacaagaagggaagaaaagtactgaaacaggagatccaaccatgatcacgggtctctagtacttaaacactgagatttctgcagggctctatgtgctgaaaaatctcaagtatctcaagagtgtgtcataaatgaagagtgtcagaagtgagcagatcataaatgttcaaaacaagtgtgggagggacctagatgcagggactacatccggaatatacggtgccctctgatgccaatctcattgttttttttttttttttttgtgacggagtctcactctatcgtggaggctggagtgcagtggagcaatctcagctcactacaacctctgcctcctggattcaagaaattctcctgcctcagcctcccgagtagctgggattacaggcacctgccaccaggcctggctaaattttgtattttcagtagagacagggtttcaccatgttggccaggctggtctcgaactcctgacctcatgatctgcccgcctcggcctcccaaagtgctgggatcataggtgtgagccaccatgcccggcctcatcctcttatacacacactttgggtcacacctttgagctttttaggtttcaatgtattctccaccatgaagctattcagaattatccttctcccctaagtcatctaattttccctcctttctcaccaaaaacacttcctcagtaataggcagaggattattacttgaagttgctttttttttttaactgaggaaatgtcaggcatgttattttcagagtgatttaaacagctctagtgttatagctaaacagaaagaacaaagatgctaaaatattaatcatcctgcccagctgcccactgggagtagctgaaaatggcaacgtgctgctgtctcctggcttcatgtctacgttactgcctgtgcagctcacaaacactccctttcctgaacatatggagcaatctcaggaaggaatttgcctcagtgaaccctgactagccaatcaaaaccagacggttccaagttcagtgactaatatcagggatgaattgtgcgtggtgaaaaggaaattttgtgtgccggagaaatgtataccctgagatcagccatatcacaggtgtgcaggatcacctggagaaaatgaacttgagaaaaggcgagttcaaacatttcttcaagcagcacgcctgtcatcacagagtatgaaaaactgaacagcgctatgcggtatcggatcactcgaacaacgacgacaacaatagctgcctttagggaggacttccgggactgaagccagggcagccactgcactgagccctgcatatacgcgatcccatttagtttaatcctcacaaactgtaaggtaggtacaatcacctctggtctacatacaagggatgaggtttgagaagattaagtgaattgctcttccttgcacacctagaaaatggaggaagtgggtatctctgattccaaagcccttgtttttaaccaccatactattttagtattctttttttttttcagatggagtctcgctcttgttgcccaggctggagtgcactggcgcaatctcggctcactgcaacctctgcctcctgggttcaagtgattctcctgcctcagcctcccgagtagcagggattacaggtgcacgccacc[138 bp omitted]cccagctattttagtattctttccttctttctcatgccctgatattcataggaaaggtaaaaagcttgtaaattagatggaagaaacattaaaacctaataggtattggctgtgtgggatgccttggaaaacatggtggactgtttccaaagagtggactaaattcattaatcgccctgggagataagtactacttccaagatgaaaggcatttttggctcttgagaaggcccaacatttacacattttaacacaggcatggaaataagcactggagagacatttgctagctcttcagaatccatacaaactgcaaaaactcaggaagagtgctacagatttctagccagtttcatcttaacaggtatagtgatattaaatccccaaattcatttccaatatcaaaagtgacataggcctgtgtccaatatgccctcttctcatcaaacttggcctggcagggttaccaggacagtggtgtggccaggcagctccatgagaacctggggaatctcaattcaaccaaccttcaccaaccacctccgaagcatgaggcattcttatgacaataacaatgcacacttactgagcgtttactatacactaggtggtgtgctaagtcctttacagcctttttttcttttgagatgaagtctggctcttgtcccccaggctggagggcagtggcgcgatcttggctcactgcaacctctacctcccaggttcaagtgattctcctgccttagcctcctgagtagctgggattacaggtgcctgtcaccacgcccggctaatttttgtatttttagtagagatggggttacaccatgttggccaggctggtctcgaactcctgatctcaggtgatccacccgcctcagcttcccaaagtgctgggattataggtgtgagccaccgtgcccggccttttacatgcttttaactcatttgatcctcacaacaaactctgtgaggtgggttcttatttttcctactttataaatgtgataactgaggcgtacagaagttaagtaatttgccaaatcctagaggcttccagagctctctgtcttaatcactaaggctatgctgtagggtctggagggtgaaagcagtacccagcttcaggactgcaacagtgttgcagaggatccagtctcccctgggttaaggaacagaatgaatatccatccactcccctccctgacaacaatgactgcagaaaacaagctaggaagacctctctcttccccttaaggagtgggaagcatgcttggttaattgagagaagagcatcctggagaaaggctcgctttggaaaaggaagaggaaacagggaagaaaagaacaccatgaaggtgaccaaaccatggcttccatgcactcttgcttcaccaaagtgcaggggaaaccctttcccctgaagagggcgttgtgctgcttaatccactctccggagtggctcggggcatggaagagaagcaaggagcaactccaggtggcaggggaccaaggttgcctgctctgaccctcccagttgttccaggcacgtccagggccttttatccagcacagcaactaccatctcccactatttttacaaatgttagtttgaaatggatcttgaagtagtgggagctataggacagattccagttgttttcaaacaagctgtaactgagtaacagtttttaatacagaaggtcctaaaatatacagctgccataataatacacatgtaactctaaaaggcataggagaaaagacacaatattacacattttaaatgtaacacagctatggttagaaatagcgtagaaacaatatagcgaggtttgttttattttgtttttggttttttttgagatggagttttgctcttgtcacccaggctggagtgcagtggcaccatctcggctcactgcaacctctgcctcacgggttcaagcaattctcctgcctcagcctcccaagtagctgggattacaggcgtgcaccaccgcacccggctaatttttgtatttttagtaaacacggggtttcaccatgttggccaggctggtctcaaactcctgacctcaagtgatccagccgcctcgacctcccaaagtgctgggattacaggtgtgagccactgcacccagcaatatagtggttttatctcaaggattaataaacatcttacgaaaatgttaggaatggggtgataacatccagagacttgtattctagttaactcagtccccatccgacccaggtgatttaatactccatacctaacaattttcaaatgcttaaaactggcagatcaatatcccacgtgtggcaggcacagagacgcaccacacagttcctctttcaagcaaggcctttctgcctcagctgctgggagtgctcttggcagacggtcttcaactgccagcctctcaagggcatagagctgccctgcccaaggacccggccttcccagggtgttccccatccaatgactgatcaaggctggggcatataagcccagcaatgtgaattcaacgtgggacaatcctgaaggccatttcggcacccgggcttcccagggggctgtcgtcaaagccagccgctccctctgctaatcctgctgcccagctccctcccacaaatgttgatcccatcagtgctcctcatacgcatcccgcatacaaaagcccctccgaggctgctccccagagaatccaacccgtgcctcaatgcctctatggagaagaaaaagaaattcaattttcaagggaagtggtacaggttaagccagatggttagaaaaattgctttcattgttatcttgggaattttcctcctccaacagatggttaaagctcaacctaggagaaggctgggcagctcagccaaggtggtcatttgcgtggttccaatcagataaaggagcacagaagaactctcagggaggcacactgagctacgtggtcagcctccaatctcctttgagcaaggtgagtgctgtcctgacccactttaaagccagctcattagatatattcccattcaaatctaagtctaagttcatgtctgtctctcatcagtctgtttcatctctctctctcatacacacacacacacacacacatctacccctaaagatgttccatgtctctttctcttcctttccatagaaaactgaggcctgattacagtggtattagtcagttacatgttcataagtgataaaagattaagaagaaataggatcaccttattaatgtacatcccaagtcgttgcttcaaggacaaactctccgtgagcccatcctaaatatatctcccataaacacaaccagttcttcttcctaaagctctctgtccatttctggcaagaaaaaagtaccagagaaaatcctgtttataaaacaaagcaaaacaaaaaatggctactcttgggctctttgattggctgacaaaagaaaatggtaaaatgagtcttcaccttatcgtcacccctagagatggccaagtttggaatgagtttagcaacatgaatcctacacgagctaggagtgaatccagaagcagagaggagggtcactcttggacacaggacctcaaattatcctgttcaaatgacccaagggagtacagaaacaccttggagggtctcctaaattcacctgttcatagatacaaaacgcttatcactgaaacatactctaaaccactagctgttaattcctcaggacataataaattttttttaattgtgcttgtggatttcaaactaaccaaattggttgacagaactgttctacctttgatgtcaattcagttccccaactactgtttgaaatggttaaaataaaaacaacaacaaaaataataaagagtccttatcactgcattcaaaatgctttctcaaagatttcaccctcctggcaggactgtctagatggaaagagaatgtcgtgtctcttcccagaataaaccgttgagaccacattaccttccagttcaagctcctttaaggatttgaaattacttgaaacaactactcagcagcttcagtctctttcttacgctgtctttccctgctcaagcacttggttctaatcagaccacttccttcctgctgctttggtttttattaccaaagttcttcagtccttttcaccaccccatatgctaaacaatttccactttgagaagcacattctcagagaactctgaggataagccaagctcagctaaagatcttcaataatgaatgaaactgtgaagagctacaatttgtcttaagcggctttcaccttctttctgtatctttttccttctaaagagcatgcatctacttttctcaggaattaagcattctcattctttcattgattctccaaacaggaaaagtaacatgataaataagtcatatttggtgtaggcctctatgcagaaaaagctaacacagcaggcctaactgcttttttcttttttctttttttgagacagagtctcactctgtctcccaggctggagtgcagtggcacaatctcggctcactgcaagctccgcctcccaggttcacaccattctcctgcctcagcctcctgagtagctgggactacaggtgcccgccaccatgcctggctaattttttgtattttttttttttagtagagatggggtt[142 bp omitted]tcacctaggctggaatgcagtggcgtgatcttggctcactgcaacctccgcctcccggggcgtgagccaccgcaccctgcttttttttttttttttttttgagacagtctcactctgtcgcctaggctggaatgcagtggcatgatcttggctcactgcaacctccgcctcccgggttcaagcaattctcctgcctcagcttcccgagtagctgggattacaggcgcccgccatcacacccagctaatttttatattttttattagagacagggttt[132 bp omitted]ccaaggttggcccttccctggctggcatcctggagcttggattttgggaaggacccgccattaactggtaagagtggcaatctgtgcctaagctgtatcaatgctctgtttcattaacacctggtttccttctgggagtctgggatgtgggtacatgccagacagggtgcctatgtgaccaagaccctcaaaaaaccccgggcactgagtctctaatgagccttcctggttggtaatatgtcgcacgtgctgtcacaactcatcgttggggtaattctgtgcaccctgtgggattccactgggagaggatgcttggaatcttgcacctggtttccccagcacttcaaccaggagccttttccctttgctgattttgctttgtatccttttgctatgataaatcataatcatgaggataactacagtccattcccgctattcacagtaattatgttccataaagtcaccatgaacactgaattagcaaatactcaactgatgttcctgagggagacatgtacctctatctgtacataccccacacagatcataatattaaatcctaaaaacaactcatcctggtagattccttttttttttttttttcaaaagaaaaaacaaagttctgaagtgttacataacttgcctgaggctgctccactaagaggagccagaggtgggatttaagcctgtctgtctggccccagagccagagtgtccactggtcatccctctctgaggccgaaacaaaaggcagggcatcaccttgttcaacctcggctgggaatgtgcttgtggggtgagtcaaaccttttgccactttatccacgtccatgagtaaatgcgagagtactgctagtattcacttgggggttttaagtacattttagtgggtaggtgagtataagctgaatcctttgagtcctcctagcaaaccactaaacctggaggttgtcttggggacccccaccgtagcctccaaggagagaccaagattccccttcctgcagaggcactgaggaggagaaacagtatgactagggccaaagtggcaagaggtagagcttccagagcaacctgctctttgcatctgtgattactttggctgttcctttgaggttctctttggcctctctttttggcttgcttttttgaagtcccttctccaattcagctgctacagctggatgggcctgtggtagcctccctcttggaggtcaaataggaacagcggtgaatgaagttcaggggaaaggaagccgggtgagtcacccaggccagctgtcccagggcctgaggagagatggccttttccttgacaagtgtttccacagcttttccttggaaaaccctcatccctttctagttagatggcttctcagcctggctgcgtggccagggtcaagaccagtatatgggcctagaagaaaaaagtcagggaggaactagggcagaagcagcaaaaggtccttgtgactcaaagctggccaaacccatcaccagagctaaagctagcagcaaagtcataggacaaacaccatgcatgtgtctcaggatctttttttctttttttttttttgagatggagttttgctcttgtcacccaggctggagtgcggtggcacaatctcagctcactgcaacctctgcctcagcatcctgagtagctgggactacaggtgcccaccaccacacctggctaatttttgtatttttttagtagagacggggtttcaccatgttggccaggctggtctcgaactcctgacctccagtgatctgcccgtcttggcctcccaaagtgctgggattacaggcatgagccaccgtgcccagccatgtctcaggatcttttctgcacagttagcagattcaaagactctggtttccttgctgtaatataataaaaatatagtcatcccttggtatcttgcgggattggttccaggaccaccccttccatatacaaaatccatggatgctcaagtcccatatataaaatggtgtagcatttacatataacctacacacatcctcccgtataactttaagtcatctctagattactcataatccctaatacaatggaaatgctatgtaatagatgttacgctatatggtttagagaatcgtgacaagaaaaaagtctgcacatgttcagtgcagattcaaccatccatttttaaaaaaaaaatttgattctcagttggttggattcatggatgcggaacccacagatacagagggccaagtatacatatgtttggtctttaccccaggttcctggcacagagcttcaaaaacctttggaatttcctgagtgctagacgtgtcttttgttattcatgatgagtctttttggactcctgctaatttctttggggaaattcatctatgaacacatcagataataactcacggtaggctcttagacaatttcaaagaaagggctagccataccaatggctagagggctggaactttcaggccaactcccaacccccagggaggggagggaggctggagatcaaggtcagtcaagtggctgatgatgtcatcgatcgtgcctatgtaaagaagtctccataaaaacccttgaacaaggttcagggagctgctggattggtgaacacatcagtgtgctggggcaggagttgggggacaaggagagggtgatacatggagagggtgatacatggagagggcatgggagctctgtaccaccaccccaacctctataccttgccctatatactgtgccttttccatttgactgtccccgagttggatccttttaataaaactgtaatagtaagtatagtgctttcctgagttcagtgagtcattctagtaagttatcaaatcctgaaggggggtcatgggaacccctcagtttttttctttctttttgagatggagtctcactctgtcacccagactggagtgcaatggcgcaatcttggctcactgcaacctccgcctcccgggttcaagtgattctcctgcctcagcctcccaagtagctgggactacaggtgccactaactgggtagccaacaattcaattctgacattacccagagttagcatcagactccacaggtttaagggcttgatcccacaagactgttctaacttcagataccagccattagtcctggggtatcccca[184 bp omitted]gtggtgcatgccagtaatcccagctactcgggaggctgaggcaggagaatcgcttgaatccaggaggcagaggttgcagtgagctgatatcatgccactgcactccagcctgggcgacagagcaagactctgtagcaaaaaacaaaaacaaacaaaaaaaacttgttttactgaagcctccagaacaccagctgtttcagcaaaatgatttctatagatactatgacctggtaaaaaaatgcaaaagagagagactttgagctccaaacagtagagaaagcacacatggttgcctccttcattccaaagagcacaatgaaatggcagtcaagctatttttgaaagaataaatccatggtggcactgaagacacgaagaagcgttatcaatgaagacatcattttggagattctcttcaagaatagagttgggactgtattgaccaataaaccaaaactgggggtggggaatgggtgaaatacagctggaaatacatcaggctgcagataagaagctctttctttttgacagaaccctggagaggctccaagcttagagtcaatggctattggcagccacagaatggcctacaaagaagtggttataaggcaggaatcagggcatctgagtggagagctgtctacagaacagctgagccagtctgcccacagccctgccctgtgtagactgcagtctgcagtacttgcccccagctggaacccccggaacagccttctctggagaggaaagtttgcctgggagtgcgcatggtgttggtgtccaggctagagaatgagtcaaagaagagcctctaggatagacacaggggtaaaaagaaataaaacatataaaagatgtcaccccaagattggagttctccttatgttattagttttgttatagcaaatggtcctgaatcggcttgtgccctcttttacctaaccatatatcctagaaagaaacctgccgactggcatatcttgcccatttacacagagtacacatcacagcctgtcttcccactcaagaaagaagcctttcgggtaaataaacttgcctaaagggccgcccgtggtggctcacgcctgtcatcccagcacttcgggaggtcaaggtcggcggatcacgaggtcaggagttcgagaccagcctgaccaacatggtgaaaccccatctctactaaaaatacaaaaatcagctgggtatggtggcacatgcttgtaatcccaactactcaggaggctgagacagaagaatcgtttgaagccggggggcggaggttgcagtgaggcgagatcgtgccactgcactccagcatgggcgacagagcgagactccgtctcagaaaacaaaacaaaacgaaacctacccaaatacaaagaaagcctattgcagctacctatacaaatcaatatggtccttcattcataaatatgaagaatcaatgaagaattagcagacgtgaggaaaagcccatagcatgtgtattagtttgtaaaggttgccataacaaagtactacagactagggagcttaaataacattaactttctcacaattcttgaggctagaagtccaaggtatagatgtgagcggaagttgtttcttcttttcttttttttttcttttttttttgagatagagtctcgttctgtcactcaggctggattgcagtggcacaatctcggctcactgcaacctccacctcccgggttcaagctattctcctggctcagcctcccaagtagctgggattagaggcacatgccaccacacccagctaatttttatatttttagtagagatggggtttc[132 bp omitted]ttggcttgtcttctccgtgtcctcacgtggcctgccctctgcatgtgtctgtgtcccacgtgcctctttttcttttttttgtgagacagggtctcactctgttgcccaggctggagcacagtggtgcaatcatggcttactgcagtcttgacctcccgggctcaagtgatcttccgacctcagcctcctgagtagctggtactacaggtgtacaccaccacattaggctaatttttttattattattattatttcttgtagagatggggtctccctgtatttcccaggctggtctcaaactcctgggcctaagtaatccacctacctcgacttctcaaagtgctaggattacaggcacaaggcaccgtgcccagcttcaggttcctctgcttaaaaggataccaggcatattggattagggcccaccacagtggccccatttaaacctaattatctctgaagaccctatctctaaataaagtcacaatctgaagtagtagggggttagtacttcaacatttgaatttggggggtgacatataattcagcccatagcagcataaaagagaaagactaagatgaataaaccaaaacttacctagagaagaaacagaaataacaaaaggagcaaaaacactcaccattttttaaagttctaactagtgccattcaaaggattaaaaagtttacaaccttatatacacacttgtgtggaaaaaaaaagcaatcatgaacattaaaacctcttggtgtttaaaactatcattctcaaaattttaaaaatcagtgagaagagctgagtaataaaatggatacagcaattgtaacagcagtcagtaaaacatgttggtaaatgtaaataaaatactgactacagaaataaaagggggcttcggttgaaaacaaaacagaagatgaagagtttaaagggaagtttaagaattctaaacttgatttattccaagatatttatttgctttagactttgttagaaaaatgtaaacttaggtatgcatgttaaatatgtgggggtggctgtggcccaaggtgggtggcctgagtatcccattcttgggtggggaagggggaaattttcccataaagctgtcatttcccagcttctagctttatttggaaagcccactttcagctgcctgcaatgcgtaggccctataacctcaactcccatatccacacgggtgtggaaatgcaggtccctaagctacatatgtggtttggttatctctgagggccatgaggcttcactcactcactggtgtaggtaagtttcttcatttctggcacctggagaactccctttgttgctttcaagctcagctaagaatatgagaacagttttttttattttgttgagacggagtctagctctgtcgcccaggctggagtgcagtggtgcaatctcgcctcactacaacctctgcttcccgggttcaagtgattctcctacctcagcctcctgagtagctgggattacaggcgtgcaccatcacacccagctaatttttgtatttttagtagagacggggtttcgccatgttggccaggctggtctcgaactcctgacctcaggtgatctgccctccttggcctcccaaagtgctgggattacaggctccagccactgcgcccagccctgaaatgctatttgaaggccgacttacggtcttttgtatacatgcaaaggagaaacggtatacattagcatggagccctagtcctgtcccaaattactattagcataaatgtttcctgactgagactattgattgtgactaaaaaaacaaagtccttcctagaaaaatataaataccttatagttttcagggcctgtgaggttttcacactgtgaagccctctgcgtcctgtctcatgacccctccacaacttcatctgggtacatgattcttgtcacttgctgttttccagccacattatacatttatgcagaaatataaagccttttgatttctccagcttgcaaagttctctgtagcctctgagatctcacaggagatatccccgttttccctgcgactcttcactggccacctcctcatcagctcccttcggcccattcctgaagctgcagcagctgcctcctcaccatcccttccacagcctcctgtccttttccttgacagtacttattaaaatctgataaaataccttattttgagatgtatttgttgaatgtctccctcccgacactagagtgtaggaatgataaaggaagggacttttagttgttattgctgtttttcactatctaggggaccagtcacacatgcagctggtacttggtaaacacctgttgaatggataaacacccccttgccaatatggctatttcttctccccaaaagtggctaaactctctcagtttagatatgctattggctgtgggacaatgaaaaaatatatatacttaatatatagtataccatatataggccaggcgcggtggctcactcctgcaatcccagccctttgggaggctgaggtgggtggatcacctgaggtcaggagtttgagatcagcctggccaacatggcgaaaacccatctctactaaaaatacaaaaattagctgggcatggtggcacatgcctgtgatcccagctacttgggagtctgaggtaggagaatcgcttgaacccaggaagcagaggttgcagtgagctgagatcgtgccactgcactccagcctgggaatacatgttatagataaagtatgcataatatacatgtattatatatataaatatatattaagtatatattcatgtattttaaatttaagtatagatgtattttataaattatatataatatatataaattatatgcatgggagaattttatgtctccctgattttcagtaaattatatagacaaaattacagaatccataagtagcaaattaagtaattttacattgaaaccactgactctactttatagcatagggtgatggtcacaccgacaccacaagccctaacccccgcctcctgccagctctcctggccccctcctgccagctctcctggccccctcctgcccatgctctctagaccctgggtacactgactgactggccttctctcaaggttctcaaccatgttacgctcctttgcgtaaaggccctttgcctatgcccttccctctgtttgcaagggtcttccctttgcttttcatacaggtaactgctgtttatccttttcaatctgttcaaatatcattttcccaggaaaggcttttctaaccctcaaaccatgccagttcttctgtttcacattcgaataggtccctgtgttatcaccgtctctaactgtgtatctgtgcagtatctgtccagcagctgcctccctgatgagaacaaatactccaggaggggaaggagccgtgacaacagacatgacatgtatatgtggattctggcacagtgcttagcacataataggagttcaacatttgtttaacgaataaacaatttggagaatgtactgaggaaggaaatatattattttggatttaggaaaaataccttactatgtttaataacactttttcttattaggaaaagaaaaagtttatttaatctagattaaaggatagctacggagctagtcagtaaaatgttcaaacagatgtgtacaaatgtggacagcagaaaggtgagttgctgccactgctgctgattttgcacatcaacttccgggaagatcttagaaagtacaggtgactctctaggtcacagatcactaaatggaagtccttccaaaagatggaaagatggcatggggtaggggagaaggatgacctcataaactcattctggtccaaaattctctgagacgaagcaacttgcaagtttatttatgaatgaaatgcagacttgagaagccactccatgaatcctagcagccagccaaagtccgctgaatgaaatctcaataaagaaaacctgaattcagactaacacagccacgtagagaaaaccctttcctcatctgacatcaatgtgtgtctatactccacatttggagggggcaggtgttaggttcctatgccaatttctttctttctttctttcttttttttgaggtggagccttgctctgtcgcccaggctggagggtagtggcatgatctcagctcactgcaagctccgcctcctgggttcatgccattctcctgcctcagcctcccgagtagctggaactacaggcacccgccaccacacctggctaattttttgtatttttagtagagacaggtttcaccatgtaagccaggatggtctctatctcctgacctcgtgatccatctgccttggcctcccaaagtgctgggattataggcgtgaaccaccgtgcccggcctcctatgccaatttctaaaagactgcttgacccataaagtgcctcatgccaccaggaagtgcacccaaagtcctcagcatagctcttccgggttacagctctgggctgtggatgagcgtgtcttcctgctcacgttccacctgccaaagagtaacaggaactccttccacttcaaatcattccatatttcctttaaaggacagcggtttctaactgtcttgcttccttcaaaaggcaaacgtacttaaattctaggggtgtagcatcagacaacatcactcctgccatagccattacgttacacagctctgagctcacaggctggagggcattgtttcaatagatcttccaacccctcccctggtctaacatgtgctcttatcaccaggagggtcaagtgggaataggtcacatattaaaccacatggcatcatactaggatggaaccaaaaatgaagtatgctatagcaggggtcccccaccccaagccgcagaccaacaccagtccatggcctgttaggaaccgagccacacagcaggacgtgagcagcaggcaagtgagcattactgcctgagctccacctcccatcagatcagcagtggcattagattctcataggaggataaaccccatcgtgaactgtgcatgcgagggatctaggttgcacactccttacgacaatctgatgcctggtgatctgaggtttaacagtttcgtcctgaaactaccccccatcctggtccatggaaaaactgtcttccacaaaactggtccctggtgccaaaaaggttggggaccgctgttctatggcaacctagactttaacaaaaagaatcttctaagccaggcgtggtgggacatgcccatagtcccagctagttgggaggctcaggcaggaggatggcttcatcccaggagctccaggccacagtgtaccatgatcgagcctgtgaatagacactgcattccagcctgagcaacacagcaagaccctgtccctatttttttttaatcgtcttacagcaatgtttctcaaacttcagcatttcaaataccacctacagaattttttttttgcctcgttcatatttcatctgtactatttttctggcttatacaagttaaatgaataaagaaattttatattgccgagaaatcagttttcagatgctagccatttttatttctatcacacaatgaaatatacaactattaaaatacaagatctttctctgtatattatctaaaataaatttgcctagcatactttggggaattctgatatcagataatacatgaagaaattccttcaccaaactttcctcacatttcaccagtacatgattaattccattatcaaagtgctaaataaacagtttgagaggcatttgagaggcttctgatagtgacttg[133 bp omitted]atggagaaaccccgtctctactaaaaatacaaaaattagctgggtgtggtggcatgcacctgtaattgcagttacttgggaggctgaggcagaagaatgggttgaacccgggaggcggaggttatggtgagccgagatcgcgccactgcactacagcctgggtaacaagagcgaaactgcgtctcaaaaaacaaaacaaaacaaaaaagaaatctcttcaagagttcagaggagctgtagacacaaatgactataaacatttcttagcaaaagggtggctaacctcaattcaatgacaattcacaaaaagacaccatgattacttctattagattcctgttgctactctaacaaattatcacacactgagtagcctggaacaataggcatttactccctttagttctagagatcagaagtctgaaaccagtttcactggactgaaattgaggcgacccccgcagaagctctcaggaagaatccatttcctggctttattccagcttttagagcttcattccttgtacccttggctcatggctccgttctccacgttcagagtcagcagcgtagcatcctgcttcagtcactgcactgcttcaatcttccgtttcaaactccctctgcctcccctttgtaaggacgtttgggatcgcacttagggttcactgggataatccaggataatctacccaccgtggcaatctggactttgcacatctgcaaagtcccttttgccatttaaggtaacattcatagattccagggatcgggactaggatatctttgggggtcattattcagcctaccacgctgttcttctaaacttttaacatgaaaattcagctgagcagttctaagagccccttaccatggtaaatcactgatgtgtatgtgaaatctttatctgatccttttttggaggcgcagagtcgtattttatcctttaaggagcacagtcatattttctagcacgttcaaaggacacgctggtctcctcaattccaggactgactctacgaatacaattggttttccttatcactctggttcccggtgtgtcacacaaagcagagaggagatgcacgcctggtcccttgtgcctacactgtcagatctcaataatccagcatcttgggcacaggcagggtgggaatgggaagtacttttaggcaaaaataagagcctggccccctttggtaagatatctccgtatgtctgccagctcctacagtggggctgaattgctatttcatgagcaatagtgtcatcttcatcaatgccaaacaaacaaaatgctctcattcaatttagcaaccatgtagtaaacattttctacatgttcacttcaggtagctgtagtgatcttgatttctggaaaaacatgtaaaataacagtttctgaacccttattcatattcattaatttaacaaatatcatcagtcactatttgccatgtgagttagcactagtgatccaacaatgaatagaatagagtgcctcccttcaagggggttccagtgcggtggagaatacagacaagtaaatgtcaatcagtcagtgacggatgctatgactagggaaatacaggatcctaggggagcatgaaagaagggaagatttcttaagagaaaaggatgcccaacctaagctcaaaaaaaaaaaaaaaaaagtcagcagtagctaaagcaagatgtatgctgaggtgggggttggaggaggaagcagagagggaagaacagtaattggcaggagggggaaggtattccagccactgggaaaagtttaatgaaagtatcagagggccgggcatggtggctcacgcctgtaatcctagcactttggaaggctgaggtgggtagattgcctgagctcaggagttcgagaccagcctgggcaacatggtgaaaccctgtctctactaaaaatacaaaaaaaaaaaaaaaattagccgggcatggtggtgcgtgcccgtaatcccagctactcgggaggctgaggcacaagaatcacttgaacccgagaggtggaggttgccatgaggcgagatcgtgccattacactccagcctgggtgacagagcaagattctgtctcaaaaaaagagaaagtgtcagaggccaggcccagcattctggtgcaactgatgaacttgaagtgagtcagtatggtggggtgtgtaattctagtgacagggaatgcaatgactagatcattgagaactagtgtggactttatcaggaaggcattgggagggccacttaaaattaataatgtagctgggtatgatggcacatgcctgtggtcccggctactgaggaggctgaagcaggaagactgcttaagcccaggaattcaagtccagcctgagcaacatgccaagaccttgtcgcttagaaaaaaaattataataagatctgtgttctgaagacaacactgatacaaggcagagaaaggctgagaaggaaataagacacaaggcaaggtatcaggctattgcagtaatcgaggccaaggatgacagtggcccagaggtatgaacagactctagtgatctttaggaagcacagctgacaggacaggacaggactcacctcatgaggaaggagtaactgggcagatgaagaaggcattcatggagaggaaagcatagggcctggcttctatgacatatatacacatacctattctgcttcataaataaaatggaaataaccctcaaagggtaaaaaaatgtatgcctgctgttgttcaaatcagaaagaaaaacaataagtaaactagacagtatcacagaggaaaaactaggaaacttagaggattgatccaggagttctttgtttttgtttttttgttttttggttttttttttttgagacagagtcttgctctgtcacccaggctggagtgcagtggcgtgatctcagctcactgcaacctccacctcccaggttcaagtgattctcctgcctcagcctcccgagtagctgggactacaggcatgtgccaccacacccagctaatttttttatttttagtagagacggggtttcaccatattgaccaggctggtctcaaactcctgacctcaaatgatccacctaccttggcctcccaaagtactgggattacaggcataagccaccatgctcggacaatccgggagttctaaatctgaccagtaggagttgcagcaagagaaaatacagaaaaacagagggaaggaaatgacaaaagaatgtcccagaatggaatctctagattgtaagggatgccaagcatccaaaacagtgaatgaaaatgtacctactttaaggcatgctcataaataaaagatcctaacatgttccagagagaaggaaataactcacctataaaaaatcaagaatcgtgataatgaacggcctaaaagtaacaacactccagtggcaatgggtacagtacagtatgcaccaagatcttagattccaaacagcatttcccaataaaaggaaccagggatccttgaggaaacagcagattccagggataggatagagaaaaaggagagcctgggacattttatgcttccagaaagcaaggaattgctcatagattgtcagggaaacatccaaaaggattggtcaatttgggatatttgagcatcaaaagaatggcaaagacctgcacacaccagcagagatttgttcttggtgtgatgtcatccatcaaatcgtgcctctatgattctttgtgatgctgatctttgtgatgtgattctttgtggtggctcatgccaaaaggtctcagaacatcaattctgttcattttcttgttttggtgttctttttaaaaagctctgctgcgggtggtggctcaagcctgtagtcccaatactttgggaggctgaggtgggaggattgcttgagctcaggaattcaagaccactctgggcaacacagggcgaccggacccccatctctacaaaaaataagttaaaattagccaggtgctatggtgccggcctgtagtcccagatactcaggaggctgaggtgggaggatcacttgagcctgggagatggaggatgcagtgagacgtgactgtgccactacactccagcttgggcaacagagtgagaccagaaccacaactctgggttctggagaagtgctggtggtctgtcatgagccctttgtgccctcccacccatagaggccacctggaactaaagagcactagaatttgtggctgcatgaggggacgtcatccactcagtgttccacttgccaacgcccctagtcagtggccattagggtctgtcatcactgggattttcacttaactgctgatccatttcctcgcttggcttggtcactggcataggaacagggtaattactggggttggtcaggccctttttaattctctatgaggaaattagaaactgaattccaaaactgaagataattcgacctttcagctttgtggttatactctaagtacaacgtattttgttagtaagattttgatacttgattccaaaatgacctagcctattgttttcctcatttaatgaaaaccaaaattcagcaggccggtaaatcacatgcagatacttgcagccaatgtgctgcccttttccagcgcccctgactccctatcactcagatcacaataaaaatccagatggggctgcagccccattcttaacacctacagctatcatggccttttttcgctttaacaaaaggaataaaagctgatgatggtcttggcagggatatacttttttatcctcagagagtctcttttcctgtgactgaaaatggctgactctgccctatctccgaggagcaaatgttcacattagaaaaccaccagcatagctgccttctctccgggaggccaccacagagaaaaccaagtttgcactggcaacgaatggaaaaatacctcctatttgtatatgtacacatgtagccacccgggtatgagatggagatgaggacaggggaggtgtgggggaagcagcaaaagggataggggcaaaatgtgcgagtcgaaggacctctgactgtgactgtgatgctgtgtatatacacgtcgccacgtggatgcgcttctgtgcatgtgggggatttagacctgtaatgtgagcatataagaaccaatacaaagtacagcgctaaatacattgtctgcatattcaacaagggcactgcttctcaaatctggcagcaccttgaaatcatcaggggtggcttcaaaaactactgatgcttgggccccacccctggaggttgtgattcacttggtataaaattactgtggtaggctgggtgcagtggctcatgcctgtaatcccagcattttgagaggccgaggcgggtagatcacctgaggtcaggagtttgaaaacagcctggccaacagggtgaaacctcgtctccaccaaaaatacaaaattagctgggcatggtggcaggcgcctgtaatcccagctacttgggaggctgaatcaggagaatcgcttgaacccgggagatggaggttgcagtgagccgagatcgcaccactgcactccagcctgggcaacaagggcgaaactctgtcttaaaaaaaaaaaaattactgtggtagacagaacagtggctccctaaagatgtccagctcgtagtccctggtgtctgtgaatatgttaggttaaatggcaaacgagccattaagcttgtagatggaatatgggttgctcatcagctgacctcaacatgaggaggtgatcctggattatctgggtgggcccaatgtcatgacaagggtccttaaaagtagaagagggaggcagcagtcagaggtacaagtgatgccatatgagaggcactcaacctactgttgttgtctttgaagacggaggaaggggtcatgggccaaggaatgtagctggacctctcaaagctggaaaatcaaagatatgaattctcccctacatcctccagaaggaagagccaccctgcccatgccttagttttagcccagtgtgactcacatcaaacttctagcccacagaactgtaagacattaagagagaaagagagagagagagagagagagtgtgtgtgtgtgtgtgtgtgtgtgttttgagagtctctcgctcggtcacgtgtgtgtgtgtgtgtgtgttttgagacagagtctcgctcagtcacccaagctggagtgcagtggtgcaatctcagctcactgcaacccctgcctcctgggttcaagcgattctcctgcctcagcctcccaagtagctgggactacaggcgcctgccaccacgcccggctaatttttgtatgtttagtacaggtggggtttta[141 bp omitted]acaacagcaacagaaaactaacacacttcaacctgaggaagctaattttaaaaatcaaattaaaaaaaatgaaaacaacaacaaaaaagaaaactaacacaggtatggcctgggctcttggagttttaaaagcagcccaggtgattctaatatgcagcaaagtatgataaccactaaaccagacgaaagacaagataaagacgtgcggcttgattgccttatgctggacaaagaaacggtgctttcatatgggaacttagtaaatcatcccaccaaattatgcatgtaaagcaccatcacttgttagccatccacccgcagacactgcagcttacctgcacgtatatcacaacacatgatcatcagtttggtggctagagtcctctctagtctcacccatcgaataggctaaatgtccttgggatgaggaacaattgtacaccagataggcagattttctataaagcttactttcctttttttttttttttgagatggattgtcactctatcgcccaggctggagtgcagtggcacaatctcggctcactgcaacgtctgcctcccaggttgaagcgattctcctgcctcagcctcccgcgtagctgggattacacgcatacaacaccatgcctggctaattttttgtatctttagtagagacagggtttcaccatgctggccaggctggtctcaaactcctgacctcgtgatccacccgcctcagcctgccaaagtgctgtgattacaggaatgagccaccgtgcccggcctataaagcttactttcttatcaatactatcacttaaggaaggaactgaccaataactgaattatatgcaaatacataaattagcctgttcgtgttggtaccatcagggaaagaactaagttgtcctctctgtgctgaaactattagaattgtaaagagagaaggcttctccattggatttagtaatctatttatttatgatagatgataaacagatggaattgatttatgacagataaatggaacagcactgcaggaacaaattaactcattcttcccaaggatggagaatagaagtgtctgctgtaggattctgagaagtgcagccctctcttcaaagcaggtgttcgtctatccccagggcttcgatgcttgctcatacatgataacttttcttttttttgagacggagacttgctctgtcgcccaggctggagtgcaatggtacaatctcggctcaccacaacctccgcctcctgggttctagcaattctcctgcctcagcctcccgagtagctgtgactacaggtgtgggccaccacgcccagctaattttttgtatttttagtagagatgaggtctcatcatgttggccaggctggtctcctgaccttgtaatccgcctgcctcagcctcccaaagtgttggaattacaggtgtgagccaccgcacccacctgataacttttcttgaaagccattccatcgtgttattactaaaagctgaaaccttagatagaatactttacattttctttttctcttcctactttgtcttctttagagaggaagccagtttagcagcaaaagcagtcacgttagaatcagaagacctgagctggagtttagctctgtcactcataagcgatgtggtctcagggggccctgcagccactctgagttttgcctctcacacgaggagggtgccgccttcatgatgttgtgtggagatgaaatgaaatgacatagatgaaagggcttagcacatagtgggggctttccataaatgccagcttcactgccactcaacgactccacgctgtcacacgtcacctctacactgcagctgctcccatctcttctctttggctccgccctctccctgagctctggtaccctgtctcccactgtcaactggacatctcccgccggcatctctaattagacacatgcaaactggacttaccatctcacccaaaaaccagtgtctgctctcaagtttcccaacttcatccttaacgtaaaatcactggcaatcccgtgcccccgtatttcttccccctttctgcccctacaacccatccaggccctcctcaagccaagagccttgcagatgcctacacgtcttaaacactccccaatccaccctgcttgcagtttgcaaattcatctttttccaaccagacttgtcacatcaaaccctgaacaaagatcttcaaacccttttttgccctgaagcctggtacataggatcgaagaagagcaaactccaccgggtgtggggatgacaggaggcccacacagcctcagtgtacaaagtgctgagcaatttcatatcactgccacatagaagaaaagctcttgggatgaatggatcataaaacacagtattgttaaaagcagctactgagaactggaaaatttttcaccaaatttctttgcatagtatttaacaactatcatctaaatctgccacaacccccactccaatgcgttaaactgtaacaatcattgacattaaaccactttacatgttgtataatcttaaactcattcaacaaatgctcaagcctttagtatttatgtcaacggcaaatctggtcaatcccagacttattcttaccattttgttcatccaattcattcccaatttcctgccccatttgtttttggcgacttatgatagaggaaagggcatcaaggcctgcgtcctgttctgaaagaaaaaagaaaaataattaactagaaactagaagaaaacaacttaaagtccataagtatacccaggcatataacacaagttgacatataaatcagtcaggaaaaaaaagagaaaagagttaacattattggaacaaaatttaaaaactaaacacctacctgacaccttaaactaaaacgatttccaaaagaattaagattttaaatatgaaaaacaaagtaagatttggaaacatgaacatttaaactttctgatacttaatatataaagagcatgtacaaatcaataagaaaaagactgaatatcccaattttttaaatcagcagaggatacaggcaagaacttcacaataaaaaagaaaataaagttttaacatcgctactaatttttttaaaaatacaaataaaaaactactttttttggcttatcagatgtataaggattaaaaagaatgacaatacctaaggttaattaaattgtgacgatctagaagctcccaagtactatgtaataggtgaataagttttactgacggccgtatttctcaagtgtagactgtgcccacctttttacctgccaattctaagtctaggaatgtatgtaagaaaatattcagatagcatgtaatgatggatatacaaggatattccctgaaacatttgtttcttgtgccagatatcaacttagtgcctctcagcaacaaattccctctttttggctgctctatgaagatgaaccagctgggcacagtggctcatgcctgttatcccagccactttgggaagccaaggcaggaggttcacttgaagccaggagttcaaaaccatcctgcatcaaaaagtaa[226 bp omitted]tgaggcaggagaatggtgtgaacccaggaagcggagattgcagtgagctgagattgcgccaatgcactccagcctgggtgacagagtgagactccgtctcaaaaaaaaaaaaaaaattagctaggcacgatggcatgtacctgtagtgtcagctacttgggaggctgaggtgagaggattggttgatcatccaggagttcgaggctgcagtgagccatgatcacgccactgcaccccagcctgggtgatagagagaggctctgtctctaaataaaaaataatttgaaaattttttaaaaaagaaaatgaaccaaggctgcttgaatactttttcctttgtcagagtttttgcttcctggctccagcctgcaatcttggcaggctccttcagcaactgcaactccttcagtgcctggccccttcagtgcacagtggccagcaatacccagaaccagcaacttctcccagcacaccccctcctcgggcaggtttataacaagagcgcctccagggaggttcttccccatgaagagtttcccccagcatcccagagggcagatctccaggaggttctgacagcagggcaccacgggggcttctgtgaaattcagggaccctcagctgagccttctcttagccctaggggcgtgggctcctccctggacattctgtctcagcctgagacttggtgattgcaccttatccctgctagttctgttttgagagttcttttgacctcttgttagctaatccctcgttactctaatccctgttaaaattaataatttacattcaactttccctgtcaaatttctctctcctgatcagacccatagtgatatacttataatagtgaaaaattagaaagtacctaaatgcccaaacacagagatgtttataaatttatagtatatccacatagtaaaacactgtatagccactgaaaatcatattgtttatctatattttgatgttgaaagaagttcatatgttttgtttt[136 bp omitted]gcctcccgagtagctgggactacaggcgcccgccaccacgcccggctaattttttgtgtttttaatagagacggg[148 bp omitted]agtggctcacgcctgtaatcccagcactttagggggctgaagcgggcagatcacttaagcccaggagtttgagaccagactgggcaacactgtctgtctctactaaaaatacaaacattatctgggtgtggtggcgcatgcctatagtcccagctactcggaggtggatggatcacttgagcatgggaggcagaggtcacag[132 bp omitted]gtattactttgaaactttttgcaaatttaaagagcaaagttagtttttgaaaatttaaagaaaaaggtgagttaaactcaagttactcacgatcctttctttaaaatttaatatgtatattttgaactgggggtctcggtcatgtctttgtaaaaattttcttcctctaatttcaggtgctttgagaacactgtgaagctgagtgtaatgactcttgttcaccacggaacacgccgcatgaaggtaacattgtacccctcgcagcttcatttgtctacagggtttttgaaatgactgtttcacataaaggcttatctacaaaagcaaaaatcacaaaggtcttactcgaggtcgcattaacatttacttatattttttccaagtctttttatggaattaaatcatcaaacttagctctttaattcatctggaatttatttaaactaacggtgtgaggtaacaacccctttgtgacattgtttgacacactgtactttttttaactatacaaatgacctgccgtctttagggatcattcacaaggaccattttatagtaaaatcactttataatgaggtcctcttggtctttaataacaacctcttggatggcctccaagataaatccatcctcaaccaagtgctcctataggatgactgatgttatagtaaaattctaaatgcatctgatgaataatctatatatataggactgagggttgagtgtcaacgtggattaaaagataaaaccatttaaaaataggaaaggcaattcctccacagtttccattaggaaaagagtcattaaactcctaaaattgctttatctagtagagacatagattatgaatgaaaaatacactaattacactctttaatctcaaacttgactcattatctgatttagcaacctgatgatcatctaatgcacatgagaaagagaactaaaagttctgttcccctctaataatttgtataagcttagcaattctctccacatctttaagtgctgcagtaaattttcattacacaatccaaagacacagaagattcagataatcgagatgctgtagaggtaataataatcacattcataacctgggcttccccaagtcctgaagaggcatttctaaggggaaggtggtatggctatcttagagacaatgatcaaaacacaatgctgctgactgcaaaaatataaataatcaagaaccatgcatgggcatggtggtgtgcgcctgtagtctcagctattcgggaggctaaggcaggaggactgcttgagcccagaagttcaagtccagccaggggcaatatagcaagactcctgtctcaaaaagaaaaaaagaagaagaaaccataccatgcagtttctttttctttctctttttttttttttttttgagacagagtttcgctcttgtcgcccaggctggagtacaatggcatgatctcggctcactgtaacctccaccttccaagttcaagcaattctcctgtctccgcctccccagtggctgggattacaggcatccaccacaatgtccagctaatttttgtatttttagtagagacgaggtttt[143 bp omitted]aactgccaaaatctgccctactctttcacataacccaagtcatgatgatatcacaagagggcaattgtaacataccacactctatcagtcattattctattttacaatgatttgaatttttaaaaatggatggatcattgttacagatagaataatatcccccatgtttaagatgtccatatcctaatccccagaaactatgaatatgttcccttacatggcaaaagggactttgcagatgtgattaaggttaaaaatctgagacgggggattagcctggattatccaggtggatccagtataatcatatgagtcctgaaaagcagagaacctttcccagctgccatcagagggagtatgaagaagggtcagagagagataacttactggctttgaagacgaaagaagagatgtgggagccctctagaagctacaaaaagtaagggaacgaattctccagaatgagcctccagaaaagaatcaagctaactgcttgatctgagccctgtgggacctgcattggactactcacctacagaactgtaagatcataaatgtgttttaagtcactaagtttgtgctaatttattaaagcagcaatagaaaactaatacaatcattttttaaaaatccccttgaaaccattaggtgtttggatatttcctatctgtagacattcagaaatgcaagatctggatagtgggaaactaaagggcaaatgcagtttcaatgaagaaactgcatagaagaaaaaggaagagttggaaaaagaacctgtatattaaagaaacttaagagacataactagttgcaatgtatgggccatatttagatcctgaattgaactacctaaaagaaaacatcacagcacaatcagggaaacttgaatgctgagtatttgattagattcaggaaatattgttaacttcttaaggatgataatggcatgtgactatagttttccaaaacagtatttatcttttccaaacatatttcagatatatattctcaaatatccactgatgaaatgatacgatgtctgggatttgctcccaaaataacctaggggctgggtaggatgggtaggttacgggatggcatatacatgtgaacagattggctatgggttgacaatcactgaggctggaggatgagtaggacaaagtcattatctgacactctctactattacacgtttgaaattttccatagtaaaaagttatcaatattttaacaatacaacagagggacatccctaagagctgcaactacagtccctggattgagtacaagatccagaccccaatgactgtcttcttttcctgtgtctttgacatacatgagacttcttctttttctatgtctttgccccagatctgagcccagctagtggcacggagcaccaacatatttaaatcaaggactgaaatgtacaacacttgtttaaatcaatgaatgaccacagagggagggccctctaggtttacaaaagaaaggaatacagtctctgctagacagaaagactcctggccaatactagagagccctctgagtttacacagtcaaaaaagtagttgatgttgtgttgtccagtgcccacagagaagcaatgaacctttcacatttaacatacagaaggagctctccctcaataaaggaaggtaggaatgaaagagaagaaaatcaggtcacccaggtgcagtggctcacgcctgtaatcctagcactttgggagcctgaggtggggggggatcatctgaggtcaggagttcgagaccagcctggccaacatggcaaaatcctgtctctactaaaaatacaaatattagccagatgcagtggcatgcacctgtagtcccagctacttgggaggctgaggctggagaatcacttgaacccaggagatggaggttgtattgagttgagatcgcaccactgcactccagcctgggtgacagagtgagacaccatctcaaaaaaaaaaaacaaaagaaaagaaaaattaggtcaagctagataaaaagttaatcactatgttagaagactcagagcaagtttaagaatagatgtttttatttttgttttaagattttaggaaaggaatccttctagtctaggtgacagctacaagaaagggtatcttcaaagaaagttttctgtgaagctgtgactgcaagggttcaaaggttagctactaagattccccagtgtgaaatggagtctggctagccaccttctacagccccatttcacatgcaaacaccaagagacctaagaacgcagaaatctagaacgattgcacaatttcctgctagagtctagaaagaacatctatagaaaattcataagactagatgaagctgatgaagaaaccccatcaagaaagacctcctgggtgaaggtggaatgacacttcatacttctccaaggtctgcgatcccactcagggacaagggtgtataataaccaaagcattttgaaacaagaaacaagtacccttgttccttctatctcagggatctttgaggcaattaagtgattgtcatcacccacccatcttctgcctaatgcccatttcatgcttcaaattacagctgaaggggcacagaagccaaattggctaatttgttacgatgaggcttcacttctaggttaggcaaggaaggcattccctgcccttcagtctatgttctaccagtaaactgtaattttgggatgattttcaaagtttctaagggtcagctagagtgcagaatggctaagggattccacgggctaaaggaagtcagaaatgaccttttgtggctctttattttcatttaatgcaggacctggcaaggacgcaaacaaagccatagcaacttcagcacattgtcaagattcttgaggcagagaaaaggctaataagggttctgtgtgaagattacttccattttttgtatttgtccttgaaaaacagctcgctagcaaagaggaatatggcatttctttctttctttttcttgaagcagtcttgccctgtcgccaggctggagtgtagtagcacaatctcggctcactgcaacctccgcctcccgagttcaagccattctcctgcctcagcctcccgagtagctgggactacaggcgcccgccacggacgcccagctaatttttgtatttttagtagagatggggtttcaccatgttggccaggatggtctcgatctcttgaccttgtgatgtgcttgcctctgcctcccaaagtgctgggattaccggcgtgagccaccacgcccagccggaacatagcatttcaaaacacaaaggtaagagcagtggagagaaactgacctgcaacctgcgctgccgctccccgcaaactccacccacaccccacaggccagcaggcttcccaagggtgagaatcttcataaggaagctctgttttggagactgtgacaaacactttgaggagcatcctctcacactgacctaaagcaacccctgaaaatagcaccttctccgggacgagcatactcttcccgactgaaaacagcttttcttggcaaaatgcaacaatgccagaaaatgcatgagtattagctataaggtgctccattcaggaaatgtgagtcctgaagagcgaatggttgtgctgcatgtaaagctgtgttgtttttcatttttttcactttcctccaaatatggtaatgggtgaagtatgtaaaactgaagatgtaagagagtcacggtgtttcactgactcaataatttcactgtgaaaagggaattcgaaatagaatcagatttctgcttctgcccaagatggactgacaggcaccagacttccttctggactgaaacaactggaaaaacaaaacaaaacagggtaaatatacgaaacaacagttttaagacatggacatcaggaaatgaagggcagtgatccctgagagacgggaaacaaatgaggtgagttctaagactgccccggattactacctcataagagttcccaagccatggtgtggggatgggagaacacaggtggaacccagcattttcctcgagttgagaaaagtcccaagaggccatggtggttagaggatgtagggcacaggaccagagaggactgcagagagtactctgtagatctgcacaggggccactttgagtctcgagctgagtgtcattcagaaattagtgactttggcaaggctgcatgatccaagatcaatatacaaagatcaactgtattttgatatacaagcaacaattagaaattgatattttaaaaatgctacttagaataaaagatatgaaggccgggcgtgctggctcacgcctgtaataccagcactttgggaggccgaggcgggcagatcacgaggtcaggagattgagaccatcctggctaacatggtgaaaccctgtctctatttaaaaaaatacaaaaaattagccgcgcgtggtggcgggcacctgtagtcccagctacttgggaggctgaggcagaagaatgtcgtgaacccaggaggcagagcttgcagggagccaagatctcgctactgcactccagcctgggtcacagagtgagactgtctcaaaaaataaaataaaataaaagatatgaactatttagggataaataggataaaagatatataagacacgtatagcaaaaactaaaaggcattgctgagagaatttgagactcaatagtgttaaaatatcaattctcctcaaactaatctaaaaattcaatgtaatcccaatcaaatgcccaggaagctttcttttgtaaaattaaaaacagattctagaattcacatggaaatgcaaaagacctagaatatccaataaaattgtaaaaataaacgaagctggatgacctgtactatcttacttaatgacccatcataaaggtaaaataattaatacagtgaggcattggtataaagataaacaaatagaccaatggaaaagaacagagagtacaacagaaataggcccatacgcgcagcagctcacatctgtaatcccagcactttgggaggccgaggtgggtgggtcacctgaggtcaggagtttgagaccagcctggccaacatggagaaaccccatctctactaaaaatacaaaaattagctgggcatggtggtacatgcctgtaatcccagctactcaggaggctgaggcaggagaatcgcttgaacctgggagacggaggatgcagtaagccaggatcacgcc[144 bp omitted]aaccccatctctaaaatacaaaaaattagccaggcatggtggtgggtgcttgtagtcccagctactcgggaggctgaggcaggagaatagcgtgaacctgagaggtggagcttgcagtgagcagagattgcgtcactgcactccagcctgggcgacagagcaagactctgtctcaaaaaacaaacaaacaaaccaaacatgatgagctgtcacctcacacctgtcagaatggctatgatcaaaaagaaaaaagataacaagtgttggcaagaatgtggagaaaagcgaatccctgcacactgttggtggggatgtaaatttactgcaaccattatggaaaacagtatggaggttcttcaaaaaattaaaagtgatactagcaatcccactgctgggatttgtaggcaaagaaagccaggcaaataccatatgatctcatttatatgcagaatctgaaaaagatgaacagagaagcagagagcagaggagtggttacccagccctggggtttgggggagagatgaggagatgtgggtcacagaatacaaaatttcagttagacagaaagaataagctcaaaagatcgactgtacaacagggtaactaatatacttaaaaattgctaagagagtagattttaagtgttctcaccataaataaatatgcatgtgagcttatacataagttaattagattgatttgcccattctactatgtatacatattttgaaacaacacattgcaaaccataaatataatttttacttgcaaattaaaaattgttttaaatttaaaaagtcaaacagctactatatgactcactcattccacttgtaggtatttaccccagaaaaaatgcaaatttacgtccatacaaagtcttatacatgaatgctaatagcagctttctttgtaacagtcaaaaactgaaaaccacccaaatattaatcaacaggtgaatggatacacagattgtggtaaatccatacaatggaa[131 bp omitted]gtgaaaccccatctctactaaaaatacaaaaaaaattagctgggcatgatggcgggcgcccgtaatcccagccactcgggaagctgaggcaggagaattgcttgaacccaggaggtggaggt[134 bp omitted]tgcttagacaaagaagccagagccccttcttccccaaaaggtacatactgtatagttctatttatataaaattatagaaaatggaaactaatttatagtgacagaaagaagttcagcagttgtctgggcatggcagggaggaacaataggaagaattacaaagaggcatgaagaaaacttttgggaataacaattaggttcattatttttattgcagtgatggtttcacaggcatatacatatgtcaaagcttatcaaatcatatacttcaaacatgggccatttatgatcatatcaactacatctcaataaagctgactttagatttattttctcctcctcctcctccctcttcctttttattcattaatttttttaaagatgggattttactatgttgcctaggctggtgtcaaactcctacactcaagccatcctgctgccttggcctcccaaagtgtcaggagtacaggcatgtgccaccaggcctggcaataaagctgattttaaaaagcagaattagaaagaataatgtatctgtacatactgacattttaaaaagtccataacacatactaagtggttttttcttttttttcctttgagatggagtctcactctgttgcacaggctggagtgcagtgacatgctatatcggctcactgcaacctctgcctcctgggttcaagcgattctcctgcctcagcctcctgagtagctaggactacaggtgcgtgccaccacacccagctaattttttatttttagtagagacggcgtttcaccatg[137 bp omitted]tatatggagagagctaaatatctcatgattccatttatgtaaaataagtatatttatattgaatatatgtatgtgaatgtatacaaaaggtctaaggaaatacatattaatctgtttccagtttgagattggagaaacaatatggagggctttcatcttatacattcctatgttgtttacactttgtataacaatcatgcatacttctgaaattttaaaaatataagaaagtttaaaaaaaaaaagttaaaaagccacagggcaaaagataaaaaagaaaagccaaactgacatattttataatttaaaaaataaaatggagtcttgtgtttggagactaattcccagtcgtgaagctaaagtaaagagcataagcatcaaatttgcttggacttagattcagatctgctctctctgctcttgcccaatggaaaatcaccacttccatgagccaccgagatgagtgacagcaactgtctattcctcaggtatcctgaggcacacaccaaaagctttaaaagaccagcagttttcactccaattttcaatggggatgaggaacaaacaaggctccagtagaaaatctggtggccgggcacggtggctcacacctgtaatcccagcactttgggaggccaaggtgggaagatcatgaggtcaggagatcaagaccatcctggctaacagggtgaaaccctgtctgtactaaaaatacaaaaaattagccgggcatggtggcacgcacctgtagtcccagcttctcgggaggctgaggcaggagaatcgtttgaacccgggaggtggaggttgcagtgagccaagatcacgccactgcactccagcctaggcgacatagcaagactccgtctcaaaaaaaaaaaaaaaaaaattctggcaaggtttctgagcccacactcctcaggatatttagtaccttggataattttctgctgctgttgccggatttcatcaaaacccaagcctctggtctcctctggctcctcaaagagccaagggttgggtgctcctcgcttagcctcttcactcatcaggctggacctaaagaacaatattaaatgcatgatatatctcaaaacatgcagctcaaatgcaaattactcccacaagtgcagaggtggccagccttgaatgctttgaaaattcaattcaaacacaatttattgcatcattagtttatgccaggaactgtattcagtgctggacgagatacaaggatgaataaggcacaagcttggtcctcagaattacagcctgttatagagatgatgggagaacataatatttgtactaatcctccaagagatgtttgagttaataatcctaaaagaagttggtaataaatgaggttcttaaatttcaaaaacagaaggccgaacagcggcctttttattaggacaaagtttgtctcagaggctacgtgaccccaaaggtacaaatattatttctcaagcagacacaatgttgcgactacagattacaatgttgttgttgttttaaaaaaagaccatataatttcccattaaagggtatttggagccgggcgcagtggctcatgtgtgtaatcccagccctctgggaggctgaggcgggcagatcacctgaagtcaggagttccagaccagcccgtccaacatgatgaaaccctgtctctaataaacacaaaaaaaattagccgggcttggcggcagacatctgtaatcccagctacttgggaggctgaggcaggaaaatcgcttgaacctgagaggcggaggt[131 bp omitted]attttgtgactataatgtagcattcataacagaataaacacattctgatttgtcaatcttaaccttactccctctaataatccatgtgccctttctgcacgagaccagttggtctcgctgtctaaggaacaggaaacacatgatttccacctcagtccccatgttttcaggatttttctcctctcaagtagctcctctcctctccccacctgtctgcattctgtccaagctgagaagatcatcttgtccaggacacgaccttctgaccaattcaacaaagagatgaacattagactcatctttagagctctcaacagattcatgaaaaatcatagaataaatgatgggtgggacatcagcaagatgactgattagagtcagctggtgctcacccgctcccccccccccccacccacctttcttaggaaaggactaaggcaatgaataaacagctaagatttgacttcagtgtgggaaagtgctgaactgcagtggggaagtggagaggcccctgtggtgactgaaagtctaggagggcagcatgaaggcccccagcctctgtggccccatctcttccaccaggactgaggaggcctggacatatgaaggccttctccctgtgaggaaaaggtaagcgggagattcccacctgcccccactgccactgcaaacacctacagtccttattacaggaggatcccccagtccttgcaagttctgagcccagtttggagagctgctgggaattcgtacagttgcactgccccagattaggagcattccccactccccacccactccatgagccaagttactacagcatggcgccatctttagaccacagctccctctggagtgtgccttcctcttggggccagtagccactgcacctttccagcactgggactccattttcatgccaccaaagctacacaggtggctgaactccacaacccagggctcgggaatggctgtgactctggtcctgcaatgaagggaaaccaccctctgcactttcagccacagaaacagtcccacccagggcaaacccactcttgagccaaccaaactgctgcataccctcctgcaagcagaaggccctgagcaactgacaggctagcagagtgactacgctcctgcatcccggatctatgaaacagtcgggcagtgcagccccctacagacatgcccccggcctgcccaaaggccccacacctcaatcagggcctgagaaacaaccctgcaggctgcccctggcagacatacccccaggccagccaagtagccatgtgtccatatctcaggcctgaaaaacagcccatgggtcacccctagcggcaactcccctaggccagccgagcagccttgtgttcatatcccgggtctgagaagcaactcctcaggccactcctggcagacatgcccccggggccatcaagcagacttatgcccacctctcatgcctgagaaatagccctgtaggctgtccccagcaggcattccccacaggagagctgagcagcagtgtgcccatgtcccaaacctgagaaacagcccaacaggccacctctggcaggcatactcccagactggccaagcaaccaagcaactgtgccctcagccagagtaagggcaccaaccccaaccccagcaagtgagaccccaagttggacaacccaccatgtgaacgcatgcatcgctgacctgacaaatagcccggtgaacacatccctggcaaagtcatgccaccaccaccacaaagcctctcagctgaggccactgagacactcacaaatgtcactggcatggattacagttaaagaaactacacaaaaactacactactatgcccacctggaaccaaagccaatgcatcccactgaaccaacaccccaagatccattcatacaaatatttctttccctgcaaaacctaccacataaaattggaagaggcaattattccaccagatgcatagacatcaacatagggatacatcgaacatgaaaaagcaaggaaacatgacacctccaaaggaatacaataattcctgtgtaatagaccccaatgatagagaaatatacaaaatgacagaaaaagaattcaaaatagtaatcttacagtgagatacaagataatagagctagacaatttgatgaaatcaggaaaacaattcatgacttgaacaagaaattcaacaagaagataaataccataaaaaagaacaaaacaggtatcctggagtggaagaattcaatgaataagtaaataagtacaagctagagctttaccaaaagactagaccaagcagaattttatttatttatttttttggagacaggttcttactctgtcacccaggctggagtgcagtggcattatctcagctcactgcaacctccacctcctgggctcaagtgattctccctcctcagtcctcctgagtagctgggactacaggggcatgccatcacatccagctaatttttgtattttttggtagagatggggtttcaccatgttagccaggttggtatcgaactcctaatctcaagtgatctgcccgccttggcctcccaaagtgccaggattacaggtgtgagccaccatgcgtggctgaatttttgaacttgaagacagatcttgtgaaataacacagaaagatggggggaagaaaaagtaaaatggaatgaagaaagcctacagaattcatgggacactattaagtgaacaaatattcacactgtaggtgttccagaaagagaaaagaagggcaaatgtacagaaaacattgaatgaaatagtagctgaaaacttcccaagtcttgggagcttccagatccaggaagctaaaagaatcccaaatagattccattcaaacaggacccctcttaggcacattagagtcaaattatcaaaagtcaaagacaaagaattctaaaaacagcaagagaaggactggatgtggtggctcatgcctgttatcccagtactttgggaggccgaggctggcagatcacgatgtcaggagttcaagaccagcctggccaacatggtgaaactctgtctctactaaaaatacaaaaaaattagctgggcatggtggcaggtgcctgtaatcccagctactcaggaggcagaggcaggagaatcacttgaacctgggaggcggaggttgcagtgagctgagaccacgctactgcactccagcctgggcaacagagcaagactccatctcaaaaacaaacaaacaacaatgacaaaaagaaaccagcaagagaaaagcatcaaatcacctatgagggagttcccattagactaatagcagatttctcagcagaaatcttaccaaccaagagagaataggattttatgttcaaagtactaaaagaaaaaaaaaatctgccaaccaagaatattacatgcagcaaagatatcctccagaaatgaaagagaaataaaatctttcacagacaagcaaaaacgaaggtaatccatcaccactagaccagtcttacaagaagtgctcaagggagtattacatctggaagtgaaaagatcataacagccattataaaaacatgtgacactataaaactcactggtagagccaatatacaaaggaaaaagagaaagaaatcaagccttatcacttcagaacactacccaaccacaaaaataaacagtaagaggaagtaaggaacaaaggatatagaaaacagccagaaaacaataaaatgacaagataagtcctcacctattaataataaccttgaatgtaagtgaattaaatatctcattaaaagacatagactggataactagattaaaaaaaaaaaaacaagactagactcaactatatgctgcatagaagaaactcacctgacctacagacacacatagactgaaagcaaaggtatggaaaaagatattctacgcaaacaaaaaccaaaagcaagcaggagtagctgtacttatatcagacaaaacagacttcaagtcaaaagttgtgaaattagacaaagaaggacattacataataataaagggatcaattcaacaagagaatgtaacaactgtaaatatatacacattcaataccagagcactcagatatataaagcaaacattattagctctaaagggagagatagactcaaatagagtaatagctggagattctaacatctcactctcagcattggacagatcattcagacagaaaatcaacaaagaaacatcatatttaaactacaccacagaacaaacagacctaacagatatttatggaacatttcacccaacagctacagaatatacattcttgtcaacagcacatagaacatggactgaccatatgttaggacacaaaacaagtctcaaaaatttttttagaaattgaaatcataccaagtatcctatttaaccacagtggaaaatatcaataacatgaggaacatgcaaaatgatacaaacacatggaaattaaacaacatgctcttgaacagccagtgagtgaaggacaaaattaagaatggaattttaaaattccttgaagtaaatgaaaatagaggcacaacataccgaaacctatgggacacagcaaaagtagtactatgaggcaagtgtataacaataaatgcctacaataaaaaactagaaagatttcaaataccctaacaatgtatctcaaggaaactaggaaaacaagaataaaccaaacccaaaattagtaaaggaaagaaataataaagatcagaggagaaataaatgaaattgaaataaaaaatgtatttaaaaaatcaacaaaataaaagttggttttgtgtaaagataaaattgagataccattagctagactaagaaaaaaagagagatgactcaaacaaataaaatcaggcaagaaaaaggagacatgacaatggatgccacagaaatacaaagaatcattacaggatactacaaacaactctacaccaataaattaaaaaacctagaggaaatggataaattcctggacacatacaacctatcaagattgaaccaagaagaaatttttttaaaacctgaacagaccaataacaagtaatgagattgaatcaataatataatctgccaacaaagaaaagtccaggactgaatggctttcatactgaattctaccaaacctttaaagaaaaatgcataccaattcttctcaaactattccaaaaaattgaagtgagggtattctacctaactcatgctaagaggccagaataaccctgatatcaaaagcagacaagaatacaacagaaaaagaaaagttcaggccaatatccctgataaatatacacacaaaaatcctcaatactagcaaatgaaatccaacaatacatcaaaaagataatataccatgatcaagtggaatttatccaatgaatgcaggaatggttcaacatacacaaatcaataaatgtgatatatcacatcaactataaaggacaaaacccacatgataatctgaatagatgcagaaaaaaatttgataaaattcaacatctcaattaaaaactctcaataaactaggtatagaaggaaagtacctcaacacaataaaggccatatatgacaaacccacagctaacatcatacagaaaaggtgaaagctttgcctctgagaactagaagacaaggatgcccactctcatcactcttactcaacacagtactggaagtcttagccatggtaatcagacaagagaaagtaataaatggcattaaaattggaaaggagaaagtcaaattgtttctgtttgcagaaaacatgatcttatagagagaaaagcctaaagactaccaaaaaaaaacctctcagaactgataaacaaatttagtaaagttgcagaatacaaaatcaacatacaaaaatcagtaagtggtgtttctataaataatgaactagttgaaaaagaaatcaagaagacaatctcatttacaatagcaatccccccgccaaaattacctaggaataaatttaaccaaggaggtgaaagatctctaaaagaaaaactacaaaacactgatgaaagaaattgaagaggatacagacaaaggcaaagttatttcatgctcatggattggaagaattaatattgttaaaatgactatactacccaaagcaatctacagattcaatgcaatctctatcaaaataccaataacattcttcacagcaatagaaaaaaatcttaaaaatctgcatggaaccacaaaagaccctgaagagacaagcgatcctaagcaaaaagaacaaagctggaggcatcacactaccagacttcaaaatataccacaaagctgtagtaatgtactacaatgctgtttttatgatactgacataaaaacaaacacacagaccaatggaacagaatagagaacccagaaattaatccatgtatctagagccaactgatctttttttttttttccgaggcagagtctcactctataacccagctggagtgcagtgatgcaatcttgagtcactgcaacctgtgcctcccaggctcaagtgagcctcccacctcagtctcctgagtagttgggattacaggcacacgccaccacactcagataatttttgtagagacggggtttcaccatgttgcccaggctggcctcaaactccaatctgcccacctcagcctcccaaaatgctgggatcacagatgtgaacccagccaagcctactcatttttaacagaggtgccaagaatactcactgggggaagacagtctcttcaataaatggtgttgggaaactgaatatgcacatgcataagaatgaacctggacacccatctatcaccctaaggaaaaaatcaactcaaaatgattcaaagacctaaatgtaaaacccaaaaccataaaagtaccaggcaaaaacaaggaaaacacttcaggatgttgatctgggaaaagattttatgagtcagacctcacaagcacaggcaacaaaagcaaaaagaaacgaatgagattacaacaaactaaaaagcttctgcacagcaaaggaaacagtcaatagagtgaaaagacaatctataggagaaaatatttgcaaactgtttatccaacagaggattaatatgcaaaatatgtaaggaactcaaaatatctcaatggcaaaaatcataataataattggatggaaaaatgggcaaatgagctaggcatggtggcatgcacctatagtcccagctactcaggctgaggtgggaggattacttaagcctggataacatagtgagactctatttccaaaaaaaaaaaaaaaaaaaaagatacacaaaatatgtgaaagacagacaaatgatctgaccagacatttctcaaaaaatgacacacaaatgcgccaacaaatatatacaaattgctcagcattactaatcgtcagggaactgcaaatccaaatcacaatgaggtatcatctcattccacttagaatggctatcatcaaaaacacaaaataaatgcttgtgaggatgttgtgaaacaggaactcttatacacagatggtggaaatgtaaactagtacagccactatggagagcagtatgggggttccccaaaaaactataactagagctaccatatgatccagcaatccccctactgggcacttatccaaaggaaagaaaatcagtattttgaagagatatccacacccacatgtttactgcagcactattcacagtaggcaaaatatggaatcaacctatccaacaacagatgaatggataaagaaagtgtggtatacatacacaacggaatacaatttagccataaaaaagaataaaatcctgccattcacagcaacatggatggagctggaggacgttattatattaagtaaaataagccaggaacagaaagctaaacactgcatgttcttactcatacgcagaagctaaaaacaaaagttgatctcatagaagtaaaaagtagaacagagcacaccagaaactggggagagtagggagaagggggagagcaagagatttgttaagggacacacaattatagttggacaggaggaataagtttgagtgttctattcaccactgtaggatgactacagttaacaataaagtctccagtagctagaaggacgatatagaatgttcccaacacaaagaaatgaaaaatgtttgagattatgaatgtgctaattatcctgactggctcattatatattacatgtatgaaaacatcactatgtaccccataaatatgtataattattatatgtcaattaaaacaaaatgataggctgggtgcggtggctcacacctgtaatcccagcactttgggaggccaacgcaggtggatcacctgaggtcaggagttccagaccagcccggccaacatggtaaaaccctgtctctactaaaaacacaaaaattagctaggcatggtggcgggcgcctgtaatcccagctacttgggaggctgaggcaggaagaattgcttgaactcaggaggcggatgttgcagtgagccaagattgcgccactgcactccaacctgggcaacaaagtgaggctccatctcaaaaacaaaacaaaaacaaacaaaaaacaaaatgatgacaatgatgttacaatagcaataacaacagttaacatgcagtaagcatttgccctgtacagacacggctccaggtgatttatatatattcactcatatctccattatttataattcttctagccttgttcacatctcccatatcatccagaaacaattgctaccctattatttaaccttttatatagataaggtgcatatccactagacagaaggcagaaactgaaaatcacccttcgctgtacacacgctgtcccacaatatggagtgaacagctaatagcatatcacctactggcaacatatgaacagaaagtagctggaggattcaataatttttcattccaaaaacatttacttcgtagttattatatagtcggcattgctctcattaatgggcatgaagaaaaaatagaatatagacaaatggaccaaaatctccacccatacaaagcatagattcttgttatcggtgctgtttgcattctggtgggatgaaacaatgtgtaaaatgtgtgcaaactgtctaatgtcgtacttggaagatgttaactactatcataataccaattattgcatttttttacacagaaggcactaaaaaattttaaataaatctgtatatcacaaaagctatattaatttcacttttagtttagaactttaaagcctttggaagactatttcatgtagcaagagacaaacccaggcaaaactggaagaaaatttttgattccttagactaagattttaagcacagagttggtctcaagtatactaattagcatgccaaacagaagtatgactttcttccactttactaaaacgacaggtgtgtttctttgaagtctttctctctctctctctctctcattcattcattcatccattcatttatttgaaacagggtctcactctgtcacccaggcgggagtgcagtggtacaatcatctctcaccacacccttgacctccagagctcaagggatcctcccacctcagcctcctgagtagctgggactacaggtgcgtgcctctgcacctggctaattatttttattatttgtagagatggggtctcgctatgttgcccaagttagtcttgaactccagggctcaaacaagcctcccaccttggcctcccaaaatgctgggattacaggcatgagccactgtgcccagctggaagccttactttatgccattggcaccaaatagccaagatgtcaagattttggatttcttctctataataattattcaatttcacgtaccttcgaagaagggggaagaatgcaataggaaagggaaggaaagaagaaaattcacattcaaagcctatcccaactctcatatcatcttgcaagagccacttttcaaatcaggaattacacaggatttgtccatggtttactgcaaatgcaagtgggtcagaggtatgtaaagatactttgaaagtgcattagtaaccagctatgaccatcaaaatgagtatattgcccctgaggtgttattgctcctctgaacttaatgttggaaccagtcactggtagctcctgtgagccctagtgcatgcttttaaaaagctgttattcaaggggaaaaaatgtaaaaatatttttttcacaatctcaaaaatgacacattagaaccacagtcatatatatatatatatatatatatatatatatatatatatatatagacacctgttagaaaataaacacctgttagaaaataaaagtgacaatatgggcacaatttaatactaatatcaaacatacatcaccacagacatatatagaaaggatttcccagggttatctgattcccaaggctgaactgtctaactccacttctctctggtttgtttggtgtttctactttcctgatgccccaaacctatgaggaaatccagcaatttcactcactgaccttcactcagaaaagcaggtaagatcatgagatcataggtatccctggatgtacacccgattctcttttcatttggttttatgttcaatttaacatttggggtggtgcctattattactgttctaggtactaggaaaatacgaaaaataatatgaaaacataattcttgctttcaaggagtttataatcaaattgaaatgagaaactcaccaacatgaagcacactagttaaaataagagagcatctagctttgtatccctcctgggcaattccaaaaacctcttcagctctggttttctcacccataaaacaagcaaactaagtgggccaatggttttcaaccttctttctggcccaacacttgaggatatgatacccttgttattagtgacattggggagtaagtggggaagactcatcttggtgggagaaagcagatattctttttaatcctgcaaaagatgatttcctattgttgcaaattgtgaattagattttttcaatctcctctcaaatgttgtctcctcagagaggtttccctgactcctccatctaaaataacatctgtctctgtcactccttcaccccactcctccttatcttgcttaatttttctttatagcactgaagtcaccagccattatgcatttgtttgttttctgtctcccacgctagactataagctccacaagggcagggactaggtcttatcactccatcctttatcacattatggctggcataatggacactgaaagaaaaacatggaattaattattttttcagcaaaacccataaataaatgaatgaaatcaataaggagagttgtcaggaaattacagtatcacacattggtgctataatatgttttgtgatttcaaaggcatttcacaaacattatctcatgtgaatcgcacacagccctgtgtgtaagtcagcacaggtattactgacaagaaaactaaggcagagacatccagtggcttcctcagggccacccacctagtggcagagctaagggttcagcccacatcttgtgattcttaacccaaggcatttcctttctaccacttcagaggtttcataaaggtaaggaggttgagcacagtagttcacacctgtaatcccagcactttggaaggccaaggcaggaggactgtttgagcccaagagttcaagaccagcctgggcaacaaagcaagacccctattgtaaaaaaaaaaaaaaaaaaaaaaaggcaaagagacttaaggcagccttgaagaatgcgtgaggtttagtgaagaaaggaagagatggtaaggcattccaagaaaaggcaaaaacacgaatgagtctccaggaccaggaatgtgtaccacataaacatgtgtgatgtaagagtggagagtgggcaaaatttgggggggctagatttagaattaattccgaggtaggtagctacagtgaccctccatttgttctaataacttatcctcctattatcccaggatctcataattttaactttctactagttcttctccatcctataaatcctcaagcaatgactttctctcctatttgcagccaaacttccatgaagaataacctatgctcaccaactccacttcctgacccccgttcactcctcaacccactgcaagccaacttctacccctgcacgaccaaaatcttctcactcacagcctcctcactgccaaacactcttcccaggtcttaccagacccctcctccaggccttaccagacccctcttccaggcctcatgtgtcacagctaagcttattatccccctttccatgaatcctctcctctcttggcttcctccacaccactctctcccactgacagctccttctctataatttgcaggtacctcttcccccatctgcctctgaaatgtgggttccttgggaattcgacttagatctgctcctctcacggtattgtgtttctctgggcaagtctatctgtgctag[212 bp omitted]gaggcaggagaatcgcctgaacccggaaggcagaggttacagtggagccgagatcgtgccactgcactccagcctgggcggcagagcgagactccgtctcaaaaaaaaaaaaaaaagaataaatgctagcaatgcttaaagacattcattctatgcccagcacatatgaaatcagacacattcccttgagtcattatggtggtgaattctgaactaggggtggggagggacgtgctctccttcctagcaggacaataccagaatctggagggtttggggggagtagcacacaaatagttaaaaagaaaccccacatataaaaacattcaggcaaagcacgtcctcccaccccttacctgattgaaaatcacggtgctaaacagacttacaaatttgtctctacccataatatctccctacaggttctttatctgcatttgtgtcttttcatttaaaaatctccaactgggtattcctccccaaactcaacatatccaaaatcaaattcatgactctcaccccataagctgcttcttctcgtacgctctctattttggtgagcagcatcactgtattcccaagtcatccaagccatttttttttttttggtctcccttctaaccacatctcatcaacaaacaaggcctccctcagagatggttctcacatccaagccctgactgccctccccattggtactgccttggctcagacacccatcacctctcatgtacaacatggttacagccttctgatcggtctccttgtccccagttaccctcattcaaatcatcctacactctgctgcaagaattattgttcttaaaacagagatctcaccctatcacttccctattcaaaaacttccctgactccccagaagctacaacatggctacgatctctctacgacatcatctcctcaacatccccgcttccacaccctacttcggccctccagactgctccccaccgctcagacaaaggcaaaactttcacactctcatgtttttgcatgagtctggagtgtccccacccccaccccctttgtccatctggcaaaattctattcattcccctaaggttcaactcaaatgtcaattctgctgcttaggctttcctgatccctagccccatcccccttcccttgaatcaatcactcgctggtattcccatggtgctatgttcacaacctctaacgtggcatttatcaagcgggattgtagttagttatttactcatctgtctcccttcctaaattatgagctctgtgagggaagaggccacatgacagttatgtttatatccccaggaccaaaacacagagcctcggaatatgccagagcataagcattcagtaaatgtttatgaaccagaactaggaaaaccattgaggtttttaagctctctttcttaaaaacaaaatgagagaagcatttaacatttttatcttgaaatgttttttaaaaatcaagcaaagcaaaacttaatcaactgctacctgccttcaagacttcagcagcaaagactgatactgtttgagcagatggagagaattacttgaaagggaatttggtcagtaaaacaccttgtagctcagcctcacttttggaaatgacaagtaagaggcatttttcctctgcaaaggaaattaaagaaaggaaatgctaaatactatgcttctgagcttagaacagacttgaatttttttaataaatgatttctatccatattatttcaagatgaaacttttcaaataaatgaaacttatcaaataaatgccacatcagtaaatacgttagatatcttgtcttatcaagatttaaccaaaaagtttcacaatcacttctaaagacataaaatgatttcattttcatcccccaaagaaaatgatgtacattatttaaattatgataatatcgggggggtgcacagacaatccatgtctttctacagacaaatgaagttgaagcttgttagagttcataggaagggcgttcttatcaactgaatacagaattgaaatagcagtgaattccaagaagtagctttctttagcctttcttagcgtttcaaaaagatgtcaaagtgactatataaaatgtttgttttgtctggaaaaaatatcagtgtttgggcattcacagaccacagggaggtttgcagttaggatgagggaagatatttctggggtgtgagtgagctgagtctgcaaagcttcgtaactagacttgcctatagatttgaaaacactcctatgatataaaagggtaattcctttttcagaactttttttggtagttcctttctgtgaatataaagatgcacagaggctcaaatttcaattagaaatagattctttgacagaaattctttagagacgaagtctggcaacaatacgcagactggattacacggaagagaggctgcagtcagagaggcaggccaaaaggccagtgtggtaatttaggtgggaggtaacaggagtctggacaagggaagtgacaagagggaacagagagaaagggacaattaacatagtggctcaagggaaattccacaagtgttgatgaatagactggatatagggaataaagattgccaaacctatgtgacttgaagaaattgacacgacttcaggaaaaggaaattttttcattacctttcaattttcaacacagcacttaataacaatcccagagttaaactggtccttcaagagatcatgattatgtaggaatatctgtagccatatttactaaactgttaacatctttcagtccaatactctgtcctactcttttctgtatcccatccacccttccatccatccatccatctgacaaacactgaatatcttctatgtatcaggcactaatctagtgacttgtaagtgaacaagagagacataaatacctgacctcatggagctaatactcaagggacaataaatgcctaacattgtgccgactgcaaagttgatactcaaaatattttttgttcaaattgaataatctccattgagtattagtccagaacaaataagaatcagaacaaggaaaatatcttccttacataatatccaaggaaatttcactatagcacctttaaaatctattacaatcaaatattgttctaatttaaaagcaatcctattttttcctattcattgcttgccaaatttaccaataaaaagttttaacactaaatgaaaaccttgatgaaacagttcacagaagaatagaaatacagggtagaaaaggccatcatttttttgggtctccaactcaaatttcaaaaccccagggcactgctcctgagagtcacacaggccatcttaagcaaaaaacaaaaccaaaaggaacacttctgtaccttaaatgtttgcaaatcatggtaccttaaaagtagaagaggggcaaaaaggggtgatacacaaaaaacaagaattccaagtaaaagatgaatgagctgctctaccatatttatggtgactgagagccatctgctggttacagtttagttacaacagtccaggagggccaactattgcaggcagcttctctattacatgatgcatgcaacatgcttagaaacacaatgcactggttctcactcctgtgaggaagcttaaaaaagtttcctatcggccgggcacggtggctcacgcctataatcccagcactttgggaggctgaggcaggtggatcacgaggtcaggagatagagaccatccaggctaacacggtgaaactccgtctctactaaaaatccaaaaaaaaaaaaaaaaaaaaaattatctgggcatgtggcgggtgcctgtagtcccagctactcaggaggc[131 bp omitted]gagtaggatagtggttaccagaggctgggaagggcaagaggttgggggaaggaaaggttggttaagggagacagggaacagctggatggcagaagtgagttctggtgttctgtggcatactaaggtgaatacagcaaatgataatttacagttttttgaatagctagaagagaggattatgaatgttatcaacacaaagaaatgatacaggtttgaggttatgggtatgctaattaccctgatttgatcattacacatt[132 bp omitted]aaccccatctctactaaaaatacaaaaaattagccaggcatggtggcatgtgcctgtagtcccagctacttgggaggctgaggcaggagaatcactcgaacccaggaggcagaggttgcagtgagccgagattgcaccactgcactccagcctgggcaacagagcgagactccatctcaaaaaaaaaaaaaaaaatcacactgtaccccataaatatgtacacttatatgtcaattaaatatatatgtacatatatatatacacacacacacatatatatatttaaagagaaacaaatgcgcaaaagtcaacagaacttatataatatgagggagttggtgttcctagagccatgcctttttgacaccatctgcaataacaactctccatcttcttccagttggttcttcacaaccaaacacagttatgataaatccgttgagtgtccagtcaagatgagcaatctacatttgctttaggcattcggcatacctaatgatttccatctttgtctcaacattactgttttcactttactgtacttgtttccattctcactcattttataaagtaaaggtaaaatgcaataaaatattcaaccaattgtgcaaatcaatactgttctatgaacaaagatgtgagttcagtgaaacaaaattatcagctggcaagcagtgccaccatcaataatattaatagaaatgtgtgtttggcagctgatatacaaaaatccaaattaggcattaaaaggccatttaagagtgtcaatgaataatgcttatgcattcaagatgcacaaaagccaaggaccacctacatcgtccatttttcacctcagtgaccttactgtttattataccaattcatctaactcatgtctaaagacaacaaattttgagatggacacccacattttcaattctggcatcttttccctctggaatgtgtaagctccctcgggtaacttttatgcaaccagttgggtgccaatgtgcggactgatatggaaattactgttctaaaaagacaggattcaagaagatacacaaggaggaaaaacaacacatgatgtacaaatttctacccacttgcggtatcaatttctgtctcagtcctttcaggctgctataaccaaatacctcagactgggcaatttataaacaacagaaatttactgctcacagttctggaggccaggaagtccaagagcatggcataagcagatacggtgtctggtgaggactttttctctgctccatgggtggtgccttctacatgttctcatatgtccaaaggggcaaggaagctcccttcaatcttttttttataagggcactaatcccattcttgagggcagagtcctcatgacttacttccccgaaggtcccacctcttaatactatcacactggagattaggttctaacatatgaatcttgggaggacactactattcagaccatggcaaagggtgtcaatgaataatgcataccattcaagacatacaaaagtcaaggactgcctacatagccatcacttccacctcaataaccttgatttgctattattacaccaattcatctacttcatatctaagaaagcaaattatcaagatggacacctattttgatttgttttgttttgttttgtttttgtttgtttgagatggggtctcactctgttttttttttttgagatggggtgtcactctgtcacccaggctggagtgcagtggcacaatcttgacttactgcaacctcggcctcctgggctcaagcaattctcccacctcagcctccctagtagctaggactacaggcatgcaccaccatgtctggctaattttttgtattttgggtagagatggggtttcaccatgttgcccaagctggtttcgaactcctgacctcaagtgatccacccaccttgacctcccaaagcactgggattacaggcgtgagccactgcgcctggccaacacccacgcttttaactatgtcatcctttccctctgtgagcagggcccaggaatgtataagctccctcaggtgacttttatgcaatcagctgggcaccaatgtgcagactggtatagaaactaccacccttgaaaaagcaggattcaagaaagtacgcaagacagaaaacacatggtataaatacatggtcttctcagcctccccccactgcccacattgatttctccattttctcttttctttttttttttttgagacggagtctcactccgttgcccaggctggagtgcaatggcatgatctcggctcactgcaagctccacctcctgggttcacaccattctcctgcctc[168 bp omitted]caccgtgcccggcccagatttctccattttctaatctcccagatcatttatggctcatatcacacaaagtggcatttcactatacactatcatgtatggtccagagttgttttgtgcaagatagaaagacatccccacatggcctgctatctctgtactcccttctgctaagacggtgagtgctatcgttcattaatgtctatagaacactttccagtttacaaagagcctccacatagatttatctcatttgaacttcacaacagtttgaggaatcatggttaccttcattttcctgacaatgatgtgtagttaaaactcaaaccctggttgtctaataccaaatcctttgctccttccacagaatgacacaaggcaaacttagcaatatgccacacttgaacacctggtggaatactgtccctacgaacagggtaatactgtccctgcaagtgtgaaagacgaagtattcaaagccagtgggaaaggaatacatgagggcccctgaaagggaatcatggtaagatttcaaaagtacgagagacaaagcccaagggacaaaacccagggcaaaggatgagaggacctgggttctagttctctctcttccattgattcaccatgggcacaacgacttctctaagaatcagtctcctcatttgtaaaccaaaaaagtaatcgcttgagttataacaccgtatcagaaagaaaaaagtcaaacacacatgggagcgttgaggcctaagaccgcccccacccgccactccacatgcatcctacatgcacgtcctggaaccaacactcatgtatgcttaggggtgactgtaatatatcaaaaattgctcggtaaacagagaagagaaagagggagaaataacttttattttcaacaaacaagaacaggctttttaatttcttaaaaatttttacttaaagaaaacacaagttggaaacattttttaaaattaacaggctcacgcctgtaatcccagcactttggggggccgatatgggctgatcaagaggtcaggaaatcaagaacagcctggccaacatggtgaaaccctgtctctactaaaaatacaaaaattagccaggtgtggtggtgcgtgcctgtaatcccagctactcgggaggctgaggcaggagaatcgctgggaggtggaggttgcggtgagctgacatcacgccattgtactctgccctgggcaacaagagcaaaactccatctcaaaaaaacaaaaacaaaaaaaaagtaacgtaatgaggccaagcatagt[168 bp omitted]gaggcaggagaatggcgtgaacccgggaagcggagcttgcagtgagccgagattgcgccactgcagtccacagtccggcctgggcgacagagcgagactccgtctcaaaaaaaaaaaaaaaaaagaggctgaggcaggaggattgcttgagcccaggagttagaatccagcctgggcaacagagagagaccctgtctctacaaaataaaaatatattagccaggcatggtggcatgtgcctgtggtcccagctacttgagaggctgagttgtgaggatcacttgagcccaggagttgcaggctgcagtgagctgtgatctcaccactgcactccagcctgggtgacagagcgagaccctgtctcaaaaaaattaaaattaaaattaacataatgaactaaaatacagcgtgattaggtaattctactttcttcttcccgtttattcagaaactggagttttccttctttttcaattctcaaatgatttttttaaagacttaaaattaatacatgcaggggcaaagaatgtttttattttccataccaaaagtcacaactataccagtagttaagggctgcaattcaaaagaagataccattttttacccatcagagcaacaaaacaaaatccatcaagttctgtaacgcccactgacagctaaggtttaaggaaaggggccctcacacagattgctgaagggaatgtaaatgccacaacttttaagaaaaagacatggtggtacctattacatctttaacactcataccttttgtcccagtaaccccactttgaggactctattgctaaagaaatagaagccatggtctttaagaatatttactgcagcactcgttgtaatggcaaaaaactaaacaacccaacgtccatcaaatggggagtggctggaaaaatgcctgcatatttatattgtggaatacaactgacgaatttgtcagacacatcaacttggaggaatgtccaaatttaagtgaagaaaagtaaaattacagaggaaaatgtatagtacagttctgttttctttaaaaataggaaaggaaaactttttttaggtatgtatgtttgtaaatttatagttgtataagcatagataaatgtggggaagggaaactccaaacagccaatcctggttacttgaggagaaaggcactggaggggcagaaagggagagagagtatgaacttttgagttacacattggtatgttttgacttttttgacacggactctcgctctgtcgccaggctggagtgcagtggcgcaatcttggctcacagcaacctccgcctcccgagttcaagcgattctccggccttagcctcctgagtagctgggattacaggcgcgtgccaccatgcccggctaatttttgtatttttagtagagatgtatttagtagagagtagagaccat[135 bp omitted]cctattttaaacccaattacagggtcatttccccatgatggaagcagggagggaatacggaaagggaagaaaataggaaaacaaagatctacaaaataaatgacaacttaagtagaaactattagaaagaggtattaaaagcatccctcttcgttaaaaaaaaaattaagaataggagataaaaactaaaatcaagaaatgccaaaatcatgcatatttttccagagggaaagagaaatacaagagaaaaatatgaaagaaaaaggcaagaaaagaaggcgaaagagagagaaagaaacaagaataaatgaagtggggatcgggcagaacctacagagtcattacgggggaaatataaaaatgacaaactggcttacagggacatggagggaagagggaaaccgttacagaaagaactggagggtgatataattcctttcctaaagttaagcagtattaataccagcaatcttaacattctgtcttaactttatagggagaaaaaccctaacttttcaaaatctagcaactgggatgggctaagtttgcccttctgttgacttacatctccatcttgtggtctgttcaggacatagctcttagagagagagagagagagagagagagtgtgtgggtgcgcacacgcatgtgtgtgtatctgtatgcatatgcatgcaaatatatgcaaatatgtatgtatataaatataaccatatctactcacatgtgtaatacatgtacatgtagtatataaatgcacatatttgcacttattctttaattcaagtagaacttacaaacagaaaaatccccagtgtacagctcaaagatgattcacaaagtgaatacccacagttaaccactacccacagcaagaaaaagagtattaccagaaccccaggagccctgtcatatacccttctagtcactacttcccccaaagggaaccgctttcgtgatttataacactgtaagtctcacctttataggagtggcatcatatagcatgaactgtgtaaactcttctgtctgacatgatgtctgagatccatccatagtgtggtgtacagttgtagattgttaattctcatttgctgtgtgacatcattgtatgaatatgccatcatgtatttattcattatactatagatgttcattggattatttccaggtgagactactaagaaaagcactgtaaacagagacgcctgtagtctcaactactctggagactgaggtgggagaatcgcgtgagcccaggaccttgaggttacagtgtactatgattccatcagtgaatagccactctactccagcctgggcaacgtagcaagaccctg[184 bp omitted]tgcagtgacgggcgcctgtagtcccagcaactcgggaggctgaggcaggagaatggtgggaacccgggaggtggggcttgcagtgagccgagatcgcgccactgcaccccagcctgggagacagagtgagactccgtctcaaaaaaaaaaaaaaaaaacagcactgctataaacattcttgtacgtgccttttgtatagttccatttcagcaaatacagttttccatttcagcaaatatggttttccaaagagattgtacaatttacagtcccagcagtagtatatgagaactatagctgctccacatcctagcaacacttgacatgtctgtcattttaattttagccattcttgtagtataatgacattgtgacttgactttgcatttacttgatgactagtgaagttgaacaccttttcttacattcatcaaccattgaatatcctcttgtgaaattcaagtcttttgcctatgtttttctaacaggttgcttgcctttttcttgacttatagggattcttcatatatccaagatacatttcctatgtcaaatattaatatatgccctgcaaatacagattttcattctgtgacttgtctttcaatcattgtggtatcttttgataaaaagaattttttgttttaatgaaatccaacttatcacttgtttcctttatggttagtatgttttgtggcctgtttaagaaatctttggctatcccaagatcataaaaatgttctcctgttttcttctaaaagctctctggttcaacccttcacatttagatctataatccttttggaattatttcttatgtagggtgatagcagaggccaagattcatttttttccatgtggatatccagttgacataatgccatttattgaaaagattacctctgtcataaatcaggtgacaatatatgtgttagactgcttctgaaccctctcttttgttccacgggtttatctgcctatccttgtgctaacaccacactacagctttgtggtgagtctggataactggtcatgtgagtcctctggcctttttgttcttaaaaattgtctcagcttttcttatctctttgcattaaccatataaacagtggctgtaatcagcttctcaagtggcaaaacggaaacaaaaatctggctggggactgtaagtgggtttgctctaaatctataaatcaatcttgagggaactgatgactttacaatattgagtctcccaatctctgaacaaggcacagagactgaagagatctgagcatggtaagaccccaccccgacttactcaaagtttcactttccagagtttcagttacccacactccgaaaatattatagacaataagatattttgagagagagagagagagaccacattctcataacttccattacagtattaaactttaccatgggtatatattcacaagtaaaaatatagcatatacagggctcagtactacccaagctttcaggaatccactgagggtcttagaatgtgtcctctgcccttaagcaggggactactctttatttatctcttcagctttacttaatttccctaaataatgttttatagttttcagtgtagaagtctcatacatctttcattttacttatttctacagatttcatgtttttttttttaaagtactatgacagcagccttaaaattttttcatttgatttttctttgttgtctagcttttaaaaccttctgaggagagaaactaccaggttgctactgctaaccacgtgtggacaggctgtgcttcattttctttcacatggtaatggctggatacctttcttgacttgatcaatgacatggagttgcaatgaccatttgttcagatctcaaggtctctggttttctttgctccatcagtcatccaaagagataatctttctttacatttagtctctatttggaagtcaggctgttaatagagcttcctttcctatcccatggtgagggaaaaaaaaaaaaatccggactaagtagctacagagatctcttctggcgataatcagtcttgtgagaacatacataacctaaaaacttcgaatagctactctgtcaagttcgaaggtagtttcaagatacttaagagtattactttaagccttctacttcgtcatctccaagatacactgttaagtaaaaaagatgacgtgcagtaaagaatgcatattatattataattcctgtttttttaaaaaacacaaacaagttggaatagagactggggatatgggcccgtgcatgtatccttggatacgtgtagaatccttctggaagggcacacacacagaaaactgttaaaagtggctgcttctggggaagaaaatgggaaactgtaggtgagaagtagaaagagcctgaattttcattgattacaattttgtacagtttaacaatgtaacaaattactttaaaaataaatttatatttaaaaaacattcttcaaaaacaaatattcattcccataaaccactggaatggtcaacattttgacctaacactatcaaccaaaccgactcttccaccaagaagagtcccaaaaaatacctcatcatatgacatatctagtttctctctccaagaaaaacatggtcactgtacacattatatggctggtatcagaccattagttaagcgtattaccctaaacattctgcttcatcgtcttcaatatatactgtgaagcaaaaaaaagatgatgcagcataaagactggaaaaaaatgtgctaaggcaacatatattccaaattttttttatcagttcctacttcaaatactccctttgtcattctatcagtccttgcaccaaattatctattaacatttcaccagaatgtgtagaaaaagtcagaagctactacttctcaaaatagaattaaacaagaattaacaaaatatatacaagattatctgtctgcagaagaaaccagctctatgaaactgtatcaatgtgtcacgttaaaattgcttgcaggctggtcacgatggctcacgccttgtaatgccacggctttcggtggccgaggcaggtggatcaccggagttcaggagttcaagaccagcctggccaacatggtcaaaccccgtctctaataaaaatacaaaaatgagctgggcagggtgatatgtgcctgtagtcccagctacttgggagctgaggcaggagaatcactggaacctcggaggcagaggctgcagtgagccaagatcgtgccactgctccagcctgggtgacagagtgagactccatctcgaaacaaaacaaaacaaaaaaaccgcttgcacttcaaaagtacttctcctaagcctcttcaggaagacaagtgataggtgtaaacatcccagcttctttaaaaagtgaattgaagacttaaagtaatgactaaggttcacttgagcctaaataaaacaacccaaaaggccagcgagtgactaactctctgggatttcaataaaaggagaagtgacaagaaagaaggttcttaatgaggtcaaagaattgaaccttgagtctctggttcttcaagaaacttcaagaacagcgttgctattgcttagggagttgcagagaagggttgatacagacactacaacttgcctacccaacatcagtatgtctcatcttccttgttatcagaacctcaattttgttcagggctccactgctcagagaccataacctcatcctcattttcagctcaagaatatctccctcctgaactaacctagtcaaccacagcaaccccattctcccatcgtttttggtataacatgatcatgtgatacaatagtctatttctattttgagccagagtcaattaggcagcttccaggaagcatttcattgctctttaaaaagaaataactgaaaaatacaaaaaaagccaagataaaaaaatgctaaaagctattagagaattaagaaaatggctttaatattaataacggacattaattattgatagttttcatataaacaacaacaatagaaaagtacaatttaaaaaacctggatttaaaacagcaaccaaaaagattaaaaaaaaaacaaataaatttgaccaaaaacatgttagacttttgtgaagaagacgttactgaaagacctgaaaaatgccttggagaaacaaacaaacaaacaaacaaacaaacaaatcccacaatcttggatgagaaaattcaacattgtaaaggatttcaagatttaacacaatcccaattgtttttaaaagttgttctctcttttggaattacattagctgattctagaattcatgttaaaaaataagcaaaactcggccaggcgtggtggctcacacctataatcccagcactttgggaggccgagctaggcggatcatgaggtcaagagattgagaccatcctgccaacatggtgaaactccgtctcttctaaaaatacaaaaattagctgggcatggtggtgcgcacctgtaatcccagctacttgggaggctgaggcaggaaaattgcttgaacccaggaggcggaggttgcagtcagccgagattgcgccactgcactccagcctggcgacacagtgagattctgtctcaaaaaaaaaaggcaaaactcttaaaaagaagtttaatggcagatttgtcctatcacatattaaaacttaaagtatccatattttagaaaatgtggtactagcacataagtagacagaaggaccaatggaacacattacaaagtccagaaatagatcaaaatacatatgggaacgtattctatgataatgcagcatcttacatctgaagatgagaagatgaactactaagtaaaaaatatcgtcagtcacaaaaatagaatagagccaagtaggaaaaacgtaggattcatactcttcaccaattaaattccaaatggatcaaagatttaacagttataaaaccacagaagtaccagaaaaaagcacaggagaatttctttataaccttggttcactatagttatatataataattacataaaactctactaagatattactatataaaactctctttatatgttagtctggagtaggatacaaaagtttaacaactttctttgggaaagactgttggaaaacaggcactcacctaaattgctggcacaagtctagaggggttctaccccgctagaaaataacttgtgaaatgctattgaaattacaaacgcacataccctctgacccagccatcctacttttttttttttttttttttttttttgagacggagtcttgctctgtcacccaggctggagtgcagtggcgcaatctcggctcactgcaagctccaccttccgggttcacaccattctcctgcctc[220 bp omitted]actttcacatatgcaaaatccctctactatatttttgtaatagaaaaagactgaaaacaatactcgcatatatataagagcctagttaaatgacagtaaatgcatacaatgaaatattataaggctacaaaaactaatgacaaaaccttacgtcacgattgggaaaatctccaagatattcgatcaggtgacaaaagaatgttgcagaatgctatgtatgatatgttaccatgtgtgtaaaagatggagggagataatatattcctatttgctggtatgtgcttaagagaaccctagaaggatatgccaaaaattattgagagtaattacttatgttgaggagaaggagacatagtgggaagatttttcactgaatcctgttcaatgctttgcagatttcttagccatatgaattatattacttatgcaaaacacattctcctttctcttctattgttatgcttggagtgtggctgggaactgctgtagctattctgagaccacgagaggagtcactcggaagggaaagccgacatcgagtatcgggagatgaagggaaatgaagagacagcaactacccgaagccctgacggcatcactgggctgtcaatcaaccctctcacttctctaacttgcaacttacttcacgggatgtttttccctatttaagccattttgagcagggtaatctgttatatgtggttgagagcagccaactgctatactagtctagagagctaaacccaggcacccccttaacaatcgtcagtcagagtgggtcaggacaataagcacaacctgcttttccagactcctttgtcctcctccctgaatgctgaagaaacaaccttcccttctggtgttcatcacacttctacacacccatctgcactaattccactgtgctgtgatctgtctttgtatacatttccccttcctgagtaaactctgaactctgcaagaatgggcttattattatttttttttttttgagatggggtttcactcttgttgcccaagctggagtgcagtggcacgatctcagctcactgcaacctccaccttctggtttcaagagattctcctgcctcagcctcccgaatagctgggattacaagcgcccgccaccatgcccggctaattttttttattatttttagtagagacggggtttcaccatgttggccaggctggtctcaaacccctgacctcgtgatccacccccgccctggcctcccaaagcgctgggattacaggcatgagccaccgcatccagccaagaacgggcattataaatgacaaactaatccccccatgggcacctcttagcccaccttgcgtggcttcagtaacttctgattctaatcgttgctcaagaagaaagcagcaaggctgcaccaaagctatttgtctttccatcaaactacccaaaataattagcgaggcagagacaaagctgcatgcttcaccaggccctcctcttgagtatacagaaagactacatcccccagccgccctcagagctaggttggagccacgtgactagttatggccaaggggctgagtgtgtgaaacttgcaggccaaggcatagaagacagatgtgagttctccacaccctcattcttctccagtcacagggaacacgcacgccttgtgtcatgagagcacagcccagagatggaagcaacctgaagctcggagtcacctttacgtgacagactttacacgaggcaggcaaaaaagctttcatgtattaaaagtgtgacattcgcaggtttgttaacacagtctatcacgtcctggctcaatctttctgtcaacaaacatgtgctgaatcaacaacacacctgctgtatacccaactctgggctggatgttacggaagatacagaaaagtgcatgaagacgctcattcattgagcaattacttattaaaaattgtgctaggctttggtctctgtccttgaggtatttaaaatatagatcaagagacaaaatatacacttgcaaaagagaaaagcagttaagtattaaccatacagtctccctagctaaatcagcttcctattaatatgctctcaaaatacaatctatttttttgaacttattttactgattgtatgattctttatttcatgtctgtctctctccctggactgtacatggctcaactgcaaaaagtaggtgcttttgtagttttggttttaccactacactcccagtatcagtgtatagcacatagtaggcactcaataaagatctacttaatgaaggaaggtttgctttaccacatttttacttccttacctatttttcattaaactagcaggaaactgtaatattcttgactgtacttagtaactccttggggttcaactgcccctacactcacgtagaggacaaagcaaatctgtactgatttcagcacacccttgcacatcagaaaagctaggacgtcactgtatttcagggacatacataaaagagagaagggggtttatgatatggatgtatattccttagcaacttccttcttctagaagagtaggttggtcacgtggtaacaacattaagcaatgtgaagtataaatcaatgattctttaggaaatctaagtactatgggacataaatcatccttcttgtaaatcaacatttaaattgaaataaaacattcaacggtttcaaatggggaggagcatttttaatgttagaatttaatgtaaatttttcttttgcccatcttggctaccgatatactgatatgaaatacacattggaaatatcatgttttgtcagtagtgcaagagaaaagcctatctctaaaattaaatttaaaaatctgcactctgagaaaacgtagacgtttcattatcatcttcttttgattttagcaattggtctgcttgttaatatatccttcttgacatacaactaccacctcaaactctaaacaacttcctattccctataatcctctacagagttggtggtgtgaagattaaagcttagccaattagccacccactgcagctgagttaatcacataatctttgagatggtcacagagcagtggagtatgcaatggttttggtttttttttttctctttacaggcaaagatttaactaattgtgagatttagcaatgctctcgaatataaagggcgggagggttttaaatcagaagctgtgtcactgctttatgagacagggcttatcttcttctaagagacactgttgcacagagacttctttaacaagtttccaaataccctaaattagtcaaccattgcttatttagaccaaggcttactgctttagaataatgaccagtaatccgtaaggtaaaactaagattctgtcacatgacagctatacattcaattatgtgattgccacattaatgtctgtttaaaggaaatgctaatccaaactgaagtttgaccattcttgactctccttaataaggccacatatgaggaagaagagaaaagagggaaaagagggatggaaaggccctcgggaatgagggatggggaagaaagagaggaaaagagcgttgtgcaaagtaaatgaaaaagagggaaacagaggtaggggctctaggaagggaggctcaccaggttccaagcgagtcctggtagggtaaacagatcttgtggcattgctgccagttactagggaaatgttgattagcagattaaccccagttctctaacagtaaatgtgttgtggtcatggtctagcattcctgacaaaatgtgccatagtgagcacgtctataacatttcaaagttctgacaaggctttctggccaccatgcttctggaagtcatgaattaagggaaagacacctaccctccactcacaaagtgacaaagcaacccaactgaccccccccaccccaaaaccaagaactacagaagcaaagaaaaatgctggaggaatccagagattagagaagcaaacgaaaatgttggaggagcctagaactaggaattaactgtagagaggactaaggaaatctctgcaagtcattggagatactacagaaaccaactggcagagaaaggaatgagtttctccaaagatagatagagctgagcgttccctaagagttggtattagaaatgactaggcaactgacaatcaggagggaaggggatacaatcgaattgtaattgaacatgtcatataatgaacaagtcatgtttacaactgaattaaagtccttggaaggctaggtccaacaagagaactattaggtatgagaagttggggaaagaaggggaggtctcaaggatggggattaggagtaaagaaggcaaaaataatactcttacataggcaggtgaaggaaatcaaacaacagcaactctgacctcaaatctaagaaaatccacttccagcagtccacttcagctttagcattcactcctccatacacttcttgctggtcctcgataggtccacatggtgccatcttccctgactagttggagcaacgctagctagctgggtatttgttctcatggcccttgagcagatttcccggggacttttctacatagcttatgagagtgcttttgtctagtatgaattttcttattgatcagacttctctggaatgtctacaggacttgcactttttggacaagcatatgcggacatgttcccgttacggtgttgggtctaaagcaatcctagcccaacaaggaatcaccaatggaagtgaatgagaaattcaccttccaggccaccgacatcattctccttcctctctgtatctgcaatgattttctttcttcatggtgctcaatgtccagtcgccacattggtttcccgctcttggccagactccatgtcatccagaacggaccatcattgtgtgttatgtccacgtctaccttctccaaatcactccacaggagtcatttctccttgacagtacttacattatttttaaacagaattcttctagaaccttattctgaaccatcctagacttctggtcctgaacagaaaagatacaccaatctctatgttgcccttggtttcatcttgagagcatgtaaataagtctggccagtaactttatttcaaccctcagggattcagttacctttgcttgacagtgtctccccagtatgatctctgtccccatgccactcagccattcaccaacacaccaacaagcaacagctttagtccaccacatggatcagccttatgggcatgaagagcagaaggcagtcccagtggcaggacccaagaggtcctcagaaggcctccatccaaaaaaaccacctgacactaacctgccaaattccctaaacattcccatcaactaattcactgtggtttcaatcctagggtttaaggaggtttcggtgaaaatacctccagaagacaagacattggcagccgttgattccactgctagaattaacatgagattgttcactaataagacaataggcagcaagctgggcacggagggaagcagacacggaacaaatgagatgtggaagaggagaatggagggcagaggaccaggtgcagcgtatgatggggtcagacagaccacgtccttctagagcaatcagggggcagggcacgagggacagaagatctccgaagcaatgaggcagcctgagttccctcctagccggatggagacacaatgctccagtaataacatcttgtatttataaaggtcttagagtttacaaagcctgtctcatagcaatcacttcatctggtcctaacaacaacgaaaaatgggcagcacatgtatccccagtctaaggtcaatgacttcaaagcccacatgactgacagactagaaagctacagaactgggtccttctaacacctcatccagctctttttatggtgcaatggttacaagttcagagctaaaatccaagttctatgactgattagctttagaatcttgaaccctctgagcctgtttctcttctgcaaaatggggcattataaagagctcctgagcaaatgcacataaagagcttagcacagtgcctaccatataaaaaacaaatagcagacataagctataggtctcatgactagtacactgtgacatagagcagtcgttctaaccctgccacctactaaaaccacccggtagtctccccagccttactgctgcccaggcctcacccaagactatgaatcagactctgcaagtacatggtctaaacatttgtatttttttttttttttccattctctcttgggtgattctgatgcaaagtgccacgattaagaataaatgacacaggccaggtgtagtggctcatggctgtaatcccagcgttttgggaggctgaggcaggcagatcacctgaggtcaggagttcaagaccagcctggccaacatggtaaaacctcatctctaccaaacatacaaaattagccaggcgtggtagtgcgtgcctgtgatcccagctactcgggaggctgaggcaggagaatcacttgaactcgggaggcggaggttgcagcgagctgaaattgtgccactgcactcaagcctgggtgacacagcaaaactccgtct[142 bp omitted]aaccctgtctctactaaaaatacaaaaaattagccgggcatggtggcgggcgcctgtagtcccagctactcgggaggctgagg[132 bp omitted]ggaataaatgatacaaagcagttatttcttaaattgtaatgtgcattcaaatcacctgatgatcttgttagaatgcaagttttaattctgtagtttggggttcgggttggaaaattctgagtttgtaacacactgccaggtgatgctgatgctgcttatcagcaagtcacactgtaaaggacacagagatgatcagagaagaggggtgacaaaggcaggcaagcggggaccaaaaactaacaaaacaaacaaggacctggtgggaagacttcagaggtcctcagcctaaattcctaggttggccccttcagcatcattaagtggcacaattaatgagaagcaaagagcagagtctggtgcaaaacatgctcttctcaaatgggaaccatgactattcatcacgactgcctcatcactaccaagcagaatagtctgaatgttttgtcctctttctgaccatcatctgtctacatgaccactattcctccatgaaacaagctccccgtcctacctatgtccttattaatttcttgactaaaaagactctgccttcagtgtaaa[131 bp omitted]gcctcagcctcctgagtagctgggactacaggtgcccgccaccacaacggctacttttttgttgttgttgttgtattttagtagagatggcatttcaccttgttgcccaggctggtctcaaactcctgagctcaggcaatccacccaccttggcctcccaaagtgctaggcttacaggcgtgagccactgcacccaggcgacagtactttcttttcacctttgattcctttgctcacctgttctctttgaccaacctggaccaccaccttcatccacatacttcacccctgtaccctgggactgaatatgccagggaaatattgggaaccacagtagattggcccagcacaggcttctatcttcatttaaaccctgcccaggagactgccaacagagtatcacccctccctaactgactcttaggttcatttcttcacagaagcaacttaacatttcatctaccttcctgtatttcacagtttcttcatggaaccttggatcgccgctcctgagaagactggaacccacaggaaaatcagtttcattttcttcagcttgttctaggcagttgtttgcaatctgggttgtatattagaatcacctgagacctccctgcccctctgcccctccaccgcaatcccactctggttcacctgtcagaggtggagtctgacaatgcacggctagggtccaaaaccactgcccttgggaagccacactattcctaactggaaaccaactagaaacaagctcctctccacgataaatgcatcaaccctagcgtggaagatgaggagaggcgggtttccacccaagctcattgccttctgtgatggttcccacgatgaagctaaggaagttctagaaacagggggaggccaattctaaagaggtagcaatttacggttcatcaacctcagccttggaaagcccgacccgtcctccaggtcttccagcagaaccgggctcagagcagctgtcagctctttgaagtgtgaatcactcactggcgaagaatggggaggaggatccaactcctttgcctctgtgagccccggaccagtcttattaggactcatgttctcaatatgccaattaaaaaaaaaaacaaaaaactgctttgcccacacagagaagtagtgacctcaggagtttagaaggcagttaacaaagcagaaaactcaaccaaagaatgccaaagaaatgttctgacttcacccacagtctcccttagtatgttccacccaagatgggattcagctgaacatacctggtttactaaacccagaaaattaacgaaaactggccggg[133 bp omitted]gcacggtggcggtgggcgcctgtaatcccaactacttgggaggctgaggcagtagaatggtggaaacctgggaggtggagcttgcagagagccaagatcacgccactgcactccagcctgggtgacagagcgagactctgtctcaaacaaacaaacaaaaattaacgaaaactaaattgagtagaaaattatagtcaaacaccataaatgaatagaatagattttgattaattcctaaagtaagccattcaggaaacagctgtagtatctgcaaagaagtcttcgcccaccaagtaatccctgtaaataaaaacatcctacctgattagatctggttcggcaccctcattcttaaaggatgccagaagtagtctctctcgagttacaagatcatccaagaggttctgtcttcggtccccttcaagctgtgttctgcagatatcttgttaaggttcaatggtgaataaatgacctcgttttaactattacattattaagttagctcttcaagtcagttgtggcttttacagactgtaatcactactacccagaagggatgcgcaccactcttgcgtttttcctgctctgaccttcaccttcaccaggccgtcaggtaaaggaccttggcaggaccatcgcagaggcacttataaacactgacgtggatcatgacacaagtttttcattgagaaa[143 bp omitted]tctcctgcctcagcctcccgagtagctgggcttacagacgtgcaccaccacaaccggctaagttttgtatttttattagagacgggtttttgccatgctggccaggctggtctcgaactcatgacctcaggtgatctgcctgccttggcctcccaaagtgctggaattacaaggcgtgagtcaccacgcccagccccagtgaccaaatttaaatgacttctcctgccaatggtgcaacctggctcagtgattccttaggttttgagttatatgtgtgtgtcagtgttccagggcattttcctacatattaataccctaagatgctctgtttaaaaaagtgggggcgctgggggagagaagttctctatattgctctctttcttccatgttaatatctattaacacacctaggatatttataaagtgctactttatgcaacagatttgctctataaattgttaccatcagttcactatttaaatacattgcatgatttgtaaagaaaattacaaagagaatcattttaatgtgtgaatctagcaaacacgctagactaggagccccagaggcagagttgtagccctattccactatctatgctcttgaaccagttatttcaccttttgggatctctctttctttatatgtaacactaaatagtctctaacatcttttccacaacaattcataagtgatggttaaaaaaaaaaaaccaaacaaccatccttctgggaaatgtagtctttggaaagaaacctacaattcaccaataggtggacgagaatgcggcgcgtgcgcatgaagcaaaaagggaagtggcgtctgtcaacaaccggcgccacttcccttggactaagtacaaagttttatatactagctttcttgatgcaaactacaaaagtggttttttttttttttttttttttttggagacggagccttgttctgtctacaggctggagtgcagtggcgcgatctcggctcactgcaacctccgccacccgggttcaagcgattctcctgcctcagcctcctgagtagctgggactacaggcacgtgccaccacgcgcagctaattttttgtatttttggtagagacaggttttcaccatgttggccaggatggtctcgatctcttgacctcatgatccgttcacctcagcctcccaaagtgctgggattacaggtgtgagccagtgcgcccagacacaagtttttgtttgtttgtttttaggctgaactgtgtctatgtgtgtggtatgttaagaaacacagaagggctggacgcggtggctcaacgcctgtaatcccagcactctgggaggctgaagtgggcggatcacaaggtcaagagatggaaaccatcctggcaaacacggtaaaaccccgtctctactaaaaatataaaaactagccaggcgtggtggcgtgcgcctgtagtcccagctactcgggaggctgaggcaggaaaatcgcttgaacccgggagg[138 bp omitted]aatgaatgagtggagaaagctaacaaacacttttaaaatatatctggccaggtgtggtggcttacgcctgtaatcccagcaggtcaaggcaggtggatcacgaggtcaggagttcgagaccagcctgaccaatatggtgaaaccccatctctactaaaaacacaaaaattagctgggcatggtggcgcacaatcgcagctacgcaggaggctgaggcaggagaatcacttgaacccgggaggcggaggttgcagtgagccgagactgtgccactgcactccagcctgggtgacagagcaagactccgtctcaaaaaaaaaaaagaaaaaagaaaagaaaagaaaagaaatacacactaaaacaagataccacttccacctatcagattaggaaactgagaagacagttttggaaagggacaaggaaccagacactctcatacattctttccttttcttttcttttcttttttttttttttgttttgttttgttaagatggagtcttgctctatcatcccaggctgaaatgcagtgttgcaaccttggctcactgcaacctccactacctgggttcaagcaattctcctctcagctccccaagtagcagggattacaggtgtccaccaccacacccagctaatttttgtgggtttttttgagagacaggatttcaccatgttggccaggctggtctcaaactcctaatctaaagtgaccctcctgcctcccaaagtgctgggattacaagcatgagccacttcacctgaccttatacattctttctttattattattattattttttgagacagtgtctccctctgtcgcccagcctggagtgcagtggcatgatcttggctcactgcaacctccagctccagagtttaagcaattctcctgcctcagcctcccaagtagctgggattacatgcacatgccaccatgcccagctaatttttgtgttttcagtagagatggggtttca[132 bp omitted]aggttcaaccaactgctagactgccttctaaatacctaacaaaatataaaaggtacagtctttcaacagacatttcttcctcagatacagtcctacaaggacttagaagcaaggatgtccactgaaccattatttataatagccacattggaaatatcaataagtaactagtgtatgtaaacaatggaatgttttgcagccttaaaaaaagaataggaaagctgtttagggggctgataatgataattaacatttttgagcacttactaagtgtttacatgaattatttgacatggaataatctacaaaatataacattaaaccaaaggaggggaaaaaaacagcagcagcaaggagctaaacagtgagtagtgtgctcccactttgttaaaaaaaaatcctaactatatatgtgtgtatatacacacagaaaatttctgatatataaacattgcctctaaggaaggacaactgaggattaagggtataagagagactgatgtttcactgaatattgtttcctaatgtttgtctctatcatctgctaattaataaaaacacaagcttcagaaccatatgtataatataatccctttatagtcaaaggaattttatgtttacatatgcatatatttcaagcctagaaaagtctgagatactagctaccaaccattaacacttaactataaagaatgagatgagacaggatagaataaggaagagaaagaggagtcattggtaataactaatgagaaatgtatcagtagaaagtataatattttttgtaataaaaacaataaaggtacattttaaaatcagcagatactagttacagatttaaacttacgtcaagaaggagctaacaaagaacatcagtttcagaaacagtaaaacttgatgactatgttttgtagatgagtaaccaaagaacagaaacccacacagttgatgctagaagaggccttaaagatcccagttctcttgttttgctgaccagaaattaagggtgagcatggctaagtcacttgcctgggttaacagccatgctaggtgacagctctttcaaccctagctcatggcttttccaccaaacattctgcagacttctccaccttgagatgctgacttaactttgccacttcttagaatcctgataaaaacaatactgggagtacgaattcagaatattcccagagactctgtaaatctggaaaacaatccaattaggaacatgctgcctctttgttttatattttaatctacggagagaacagagcataaggagatggggaggagggagatggaatgagaataaattgattaatgaaccatctgcatagcacccttgctatgtaagggttgttattagtaagaggtcaaaggatcatccaggaaacaatctatacagcatgtatgtggacaggtgcgtagcagttgggtaaagtagggtagtggggaaacagtgtgcctgagtgatgctaaggacaagtagaaagtaggacacacaggccaagcgcggtggctcaagcctgtaatcccagcactttggaaggctgaggcaggcggatcatgaggtcaggagttcgagaccagcctggacaacacggtgaaaccccatctgtactaaaaaaatacaaaaattagctgggtgtggtggcacacgcctgtagtcccagctactcaggaggctgaggcaggagaatcgctggaacccgggaggcagaggttgcagtgagccaagatcgtgccactgcactccagcctgggcaacaaagtgagactccatctcaaaaaaaaaaaaaagtagtacagcacacagtcagtggccagtgctggggaacctcctcttccaccaacctggtgaatagccaaggaagaagataagagaacagacagataaagaaaaggaagagaagagctaactatcatagtactttgtccttggctatgctgattgtacatgtaattatagccaattcatggatatgtaaggttgtaaataaaactggatcccctgtagtcccagctactcgggaggctaaggcaggagaatggcgtgaacccgggaggtggagcttgcagtgagccaagatcgtgccactgcactcgagcctgggtgacacagcgagactccatctcaaaaaataaataaataaaaataaaaataaaactggatcctgatttcatattactgatacctactaccagcatgcataagtccagcttctctgctgtagcctggtgagcatttgaaccacagatggagcggggtaaatatgcaactggatccacaggtcacccaatcccactccagctcctggattttctcttatatttggtagaaggcttaagaatttaggctgggcacagtcgctcacacctgtaatcccagcactttgggatgttgaggtgggtgaatcacctgaggtcaggagtttgagaccagcctggccaacatggcaaaaccccatctctaccaaaaacacaaaaattagccaggtgtagtggtgcacacctgtaatcccaggtacttgggaggctggggtaggagaatcgcttgaacctgtgaggcggtggttgcagtgagctgagatcgcaccattgtgctccagactgggcaacaagagtgaaactccgtctcaaaaaaaaatagaatttaggtaagccttattttgtgaaagagctgctctggcgaaggaagaagtttgcagataattaattctccatgccaaaaaagaagaactgcaagggaacagtttaaggttctagaggtcaaaagacttttctggctttctttttttaagtcaacaaactctaataaatatttatgatgtaccaggccaagtccttaccttcctcaaagcactgatcacattttgcaagtactattttaataccatcattgtttgtgagttttgacataaccatcatgcatgattaaaaactccacaaagaaaggatgacctgtaaattctcaatggtagctgaaatctttacaataatgataaaataatcaatagcagctaatcctcaaggaggacttagtatatgtgaagcaccctgtatgcatataatctcatccttacacaacaatcctttacgccaggtggacttctagcatcccattccacaaatgaggcacaaagaggttaagtaacttccccaggggtgttggtaaccaccttttattcaacacccaccattatggggggctagtcctgtgaagaaaaaagattttcttcaacttgtacaataacctggcaaagtatgattattcctacattacagataatgaaactaaggtccagaaaagctgaactgctgtttggccttggtaagtggcagagctggtcttcaatctcagttctgtctgctttcagagccgatgttgttcccacgataccaatggcacctagacattcaggtttcgtggaccagtaatatgtccaaaaaaactaggggggggtgtaacttatatagaattaccaattatacattttgccaggtatggatgttcaagaaaaaaaaaaagaaacaaaactatctacttttactatcatggtgaaaaagcaaggagattttaacaccaaaaactagaaagaaccatgtaacagttctgtataaatcagaaaacaggcttgatatggtggctcacaccagtaatccaaacattttgcaggccaaggtggaggatcgcttgagactagaagttcgagaccagcctgggcaacatggcgagaccccatctctacaaaaaattagctgggcatggtggcatacacctggacccctagctacttgggaggctgaggcaggaggatctcttgaggccaggaatttgaggctgcactgagctaggattttgccactgccccccatcctaggcaacacagtgagatcctgtctttaaaaagtcagaaaaaaagttcttataaatcaaaaaacttctgctacacaaacactatcttcttcttatttttctcatgttaccaagtatcagtgaaaaccaatagacagggacagtgtttgaaaaccacttcacctccactgtagctaccaggggttacctgtaaaatctgttcagtcagcctctccacaaccacatccattggggtttgttatgtagtaatcaccacatctgtctatgcacttatctatctacttacctatctttgtttttccaaaaaatagagtagagaaaatttatttatagatttttcttttttttttttttttgagacggagtctcgctcttttgcccagactggagtgcagtggcgcgatctcggctcactgcaagctccgcatcccgggttcacgccattctcctgcctc[177 bp omitted]tttttaaaacttatttccaaaggccttctcccaagacaccaaagtactttttgacatcaaacccctctgtaaagagattttctttattctctttaaaataagtaaaggtgctgcctcctgtgaaatgccaacaaaaggataagtttcatgtgaagccaactctaagaagatggtactaagtatctttagtactatctggaatttcatatgcagcctcccacagcataaccctcttctcagctggtaagacaattatagttcctatctcaaagaaacactgtgaacagatgttaaggtctttcagaaatttaaactctctgactgcaagacttcggtttattaattgcacgctaatggattcaaaagcacagaacttccattttaacttgacttttattcttgccaggagaaaaatactttttcaggagagagcataacatctcatgccttaattccatgaatttcattgtttagaaagcatttgcacaggacttttctggcaactcctagtgttctttggacaagttcacaagtgtagaaaggcatcaatttattaagtatcataaattctcaactatccagcacagtaaggaaatgtggtattcaaatattcacattaaaaaagtcaccaaacattaattatgcctcaaaaaaaggattaaaaagtcactccattggtgatttatgaacaaacatttttctcaacatcataaagtatacctaataaaccacaatgaacactgtttaatcttcggatggttaagacggttcttgaagatttgtattataaacaagatttgtcttggcagtccagtaacacaacaattcatagagaattctagttgaagacatgccaggtgacagctgactgtattatttctactaaagtataattcagcttttaaacaattcacgttggggccacacagcctgtgtttgaacctggctcttccatttcctagttgtggggtcctgggtaatgactaaagctctccaagaatcctctcctcagtgtagaaaactcctctgctggggccgggcacagtggctcatgcctgtaatctcagcactttgggagaccaaagcgggtgcatcatgaggtcaggagttcgagaccagcttagacaacatgatgaaaccccgtctctactaaaaatataaaaattagccgggcatggtggcacatgcctgtaatcccagctactcgggaggctgaggcaggagaatcgcttgaacttgggaagcggaggttgcggtgagccgagattgtgccactgaactctagcctgggtgacagagcgagactctgtctaaaacaaacaaacaaacaaaaacaaaaaacaaacaaaccaacaaacctcctctgctggaattccgggttatctctccaacttcatcagtgactttcggtgtaaagtttaacttggcctcagtatctttctttgtaaagaagagaaggaagcaccaaaaaaatctaataatatgagattattaggactcatagattgctatctatcttaaatctggaagataactgccagagaattattttaaatgtttgggaagaagaaggaggttaggggaagggaagatgggaggaacagaaggagaattaaaaagaggccttcataatatac[136 bp omitted]catagtgaaaccttgtctctactaaaaatacaaaaattatctgggcgcagtggcgtgtgcctgtaatcccagctactcaggaggttgaggcaggaaaatcgcttgaacccaggaggtggaggttgcagtgagctgagatcgtgccactgcactccagtctgggcgacagagcaagactccatctcaaaaaaaaaaaaaaaaaaaaagttggcctccctgaaaataaacaggtttatgagcgccctcatggggtggattagctaaatgccatccctagtactggctgcaggttgttacagtagaaatagatcaattatttgaaaaaataaatagaattttaaagaaagttgttgtattccagttgaatttttgatgtctcctggtaaattctaaattatccacattaagacccctaaatatttttgtaatgttttaaataactcttgttcagtgtttttgatgcttactgcttaattcagtaatttgggaagtaattctgggacgaccacaaaaccaaaaatctgcaagatttcaacagatggtcagactgtaagcatttaggagaacaaagtcaattataactgtggtattcttagtactctctaataactagcagaaattattattaatagaaaaaagtaaaagctcttaatttgtatatttttcttgccctatagggttagcacataaataaggtgactaataatgttaccttaatggaagcaaatgcatattatatcatgaaacaatatgtagttacctttctaatatatgtgttttaggtaacactaacatgaatttacacaccttgccatgtgtagacttcccagtgcttagtaccgaaagcagaggaaacagtcctgcccatctgaaactactaaaaatacaaaaattgggccgggcgcggtggctcacgcctgtaatcccaccactttgggaggc[135 bp omitted]gaggcaggagaatggcatgaacccgggaggcagagcttgcagtgagctgagatcgcaccgctgcactccagcctgggcaacagagcaagactccgtctcaaaaaaaaaaaaaaaaattagctgggcacaatggtgcagtgagtatattaggacttgttgatttgggtaaaataaaaaccctttatatgatagaccaactgtgctgtaacaaattacaccagatggaaggtaaagtatctcagaatattccaattgcgttaaaaataaggctgtaattgtttgaaattaaacttttatttgaaaccttagtggatccgtaattgaatgtctagaaaaccatgcaactaagccaactttcctggtgatataaaggtgttacaatgggggaaaatattttttagaacactttccatttttttatctaaaaagctgtattcctgtatttccttatatttaaaatctggcaatatccattccctgaaataccaaaaattgggtctttggcatgacctactgacaatttagagaaatgatgagagaagaccagtttcaggtaagttttcaaaccaatatacacttgggtgtaaaaagttagtgtaggtaacaagtcacgtatattttcctaaattgatcagattatgaatttctctttttttattatttgagacagggtcacactctgttgcccaagctggagtgctttggcacgatctcggctcactgcaacctccgcctcccaggttcaagtgattctcctgcctcaacctcctgagtagctgggagtacaggcgtgcaccaccacgcccagctaatttttatattttcagtagagatggggtttcaccatgttgaccaggctggtctcgaactcctggcctcaagtgcttggcctcccaaagtgctgggattataggcgtgaaccattgcacctggcccagattatgaatttctaaaatatatatatatatatatatatatatatatatatatatatatatacacatacatatatatatatatatattttaacacttggtaggaggttaagatgatggcataacttgcttcaagaagtcccatcccaccccttcccctcacactcccatactagaggcagtgtctgtgcctctggaggaaaaataaggcacatctcaaatctacataaacacggggcaggtggtgagaggagagatgtatggtttctactggtattgcccactccgaaaataaatggatcattaaaaactctggaaactcccagaagcggaatcacagcttaggatgatcatggaagttttcctgttggagcagtagctagccatggtcaaggcggtctagacagagagcagtgtggggctccgtaaataccgcactgacggaaaacattagcttcctgaactgtacaggttatacccaaataagttaattccctcggtaggtcttgctttgccagcatattcactgtaaaacatgtaacagacacttaaaatagaaatcaagattacaggcaatattttggaaaccaggtcttcctcaagctgtgggaaaatctgggtggcccagattccttcctttcttaaaatacgactgcttttcctcccactctagaaaagaggtggaaatgtttacatggatacatctgatgtgttgacacagctcttagcaataagtccttcaaaagggcgatcttttccttcaggttctgcaacaaagctctgattgtcacggtaagctgaaaagaaaagaacacatcctaagtattctagtccagaatgtagaatccacaaaattacatcacgtaaacactacttcacgggctatgatgcaaccaagcaagggctggaagagatagatactcagcccctcacgacaaactcagggctggaaggaggctcagtggtgccctggcccagctgccaacctacagcttgtacccgctccacaacctggccaagtggtgagccaagccagactggaaccccgatactgactagaaactgtcagtgtgctctcaccatcagctgaatcctgtcacctgagcttctaccccattgatcctatgtatctaccttggaaccacgcaggaaattgtgttccccgagtcttcatttgagagcaaaaacccacagttctctgaaccaggcttcaaacgacaaagcatggagtcccattaccatccccaccaggctctctgaacaactggtaaaatttataacccaatgaaacgttttacggcaatgtgttctttttatgcaagaggaatgctaaccacacatgactcttttcccaggagggtgcgcattttctccaatcatcctacaggaaatttttgtccgtgactctaacctgttacattaaaggatggagaagagggcgagaagagagtctctcaggaatttggaaatgtgaaaaaactgcctgtgtaagttaaaacatattcaaccacggatgaaatcagacatatgttaaaaacacagaataccacaggtttcctttgctaccttgtcaaaagcagcaattatataactcaagcggactccctccttggatttgcagaatcacaccaaggaaaaccagccagtgtgtcagagactggcccagactgcacacatccagcagccctccaaggcaccagcagccaagaaaagtctaacctgaactatccccatacccctgggaaccaaggaacaatcacctacaatgttgtggggaaac[355 bp omitted]gcgccacacacaccaggcctacgaagaggagtccacaaaatcaaagacaaaagcatttgggagatgaaagacggagtatgtagccattaaaaattatggctcaaatctctatttgttcacatagaaagatatccatcacagcttatgaaaaaaacatcaagtcataaaataaaatatcacccaaacagagaaaaaacaacccaggaactaaatacaaacattgaaaccatgaaagcaccatggttctatctaagtagtgggattttctaatattttataagaaaatgatcacttttgtaatcaggaaaaaatgtcattatcataattaaagacactttctagagcacaaaaaaagatggaaagcctaattcacattttaagctaccataacctgggtaacaagcactgacagagataaccacatgtcaatcttacttaggaattataaatgtaaaaatcttttcaaaaaatattagcaaagcaaattcagaattacattaaaaaggaccatatactatcaacaagtagaaattattctagtaatttaagaacagtttgatgttagaaaaatctagtaataaagctcatggtgttaataattaaaaacagaataaacatatgattagtacagtacaggggaaattataaacaaaagaaacacaaaaaagaaagaaaaactaagaatagaacactactgccttaactacaatattatttaactttgctctagaagttctaaccaatacaataagaaaaattaaagaaaaatacaaggactacaaggaaagatgagattattattatttgcagattgataatagtctacttggaagagttaagagaa[132 bp omitted]acctccgcctcccgttttaagcgagtctcctgcctcagcctcctgagtagctgggactacaggcacccaccaccatgcccagctaatttttgtatttttagtagagacagagtttcaccatattggtcaggctggtctcgaactcctgacctcaggtgatccacccacctcagcctcccaaaatgctgggattacaggcatgagccaccgcgcccagactgaaagattattaaaaacagtagaggccgggctgaaagactattaaaaacagtagaggccaggtgtggtggctcacacctgtaatcacagcactttgggaggcagaggtgggagaatcacgaggtcaggagttcaaaaccagcctggccaacatggtgaaaccctgtcactactaaaaatacaaaaattagctgggcatggtggtgcgcacctgtaatctcagttactggggaggctgaggcaggagaatggcttgaacccaggaagcggaggttgcagtgagcaaagatgatgccactgtattccagcctgggcgacagagcaagactccatctcaaaaaaaaaaaaaaaaaacggtagaagaattcaatatggtcattagtcataaagtgaaaaaaaatcaagggcattcctaaatttaagtaatacctagggagagttttttaaattgttattttaaaacttcattaacaataccaacaaaatctaaaaaatatctagcacagtgcctggcacatagttaactgtgcaataaatactgctgaagaaacaaaaggaaacgctcaatattgtgaaaatgtaagttttccccaatttaaatctataaacatacatgtctacttgaaattccatttggaattcttttattgcagaagaggtgataattaaggcacagcacagtttggtttttttttttttaaatgaagttttagaaaattactctgacagaaggataaatgaaggaaaataaaaaccatgaatatgtataatgttcataggggccttaatcagatataaagtgattacaaaaaactacaatagctgatgctggcaatcaccaacagcttcagtagtgcaacataacaaatggcccagaaacaatgtagctgtataaaaatccagtgaattaaatatgaactatttcatatgagggaaagaaattcataatttaacaaatggggaaaaaataaaattagatagctatgacacaccaaagtaaacaccaagtatttcaaagatttacacacacaaaacaaaataacagaaaaaaagcttaaggaaaatttacataattaagtatttataaaacctctgcatgtaaaaggcctttttaagcatgatatcccctcccccgttagaaaagatcaccaacaaacatgctgataatttcaaataaaatttaaaaaccggtacatgttttacaatgtcacttacaaaatcaagttaatagagaaagcatttatactaaatataccagatcaaagcttaatatagttaacatatataaaaagaaaactttgaaattaagaaacaaggctgagcacggtgggtcacgcttgtaatcccagcactttgggaggccaaggcaggaggatctcttgagaccaagagtttgagaccagcctagccaacatggtgaaacctcatctctactaaaaatacaataattagccaggcgtggtggcgggtgcctgtaatcccagctacttgggacgctgtggcaggagaatcgcttgaacctgggaggctcggaggttgcagtgagccgagattgtgccattgcactccagcctaggcaacaaaagcaaaactccatctggccaaaaaaaaaaaaaaaaaaaaaagaatagatattcaagacttaataaaaaatgcatattaaactactgtaacatagtatttttacctagtagagatttttttaaaagataatcaaaattggtgtagaaatgtcattctgcaatatatgtgttcaaaaggcttaaaatgttatacaacccaaatccagaaagtctacattgaagaatttatttcaacatgggcaataatttggctatactgaaaaatcatttgtaattagaaagaatctaactgtccaagaagatgacactagttaaatagatagcagcccttcgtgtaaaagatgaaaccatatatttaatagaagaaagcaggaataaattttttataacctgcaaacagcaaaaacttagatatgactaaatatatggaagcaatta[223 bp omitted]tgaggcaggagaa[131 bp omitted]caagtcaaatgtcaaatgataaaggaaaggaaataactacaatttatcacgaggagctaatctccataatacgtgaggagctcttaaaagatcaagactaaaaaggctaataatccagtagaaaaatgggcaaaagacaagacagttcacagaaaaaaaaaaaaatatatatatatatatatggcccttaagcatatgaaaacacactccacttgactcattatatgagaaatacaaatttaaaacgacactgaaacaccatttctcacttatgaggttaacaaaaattcagaagattcacacaccctctgttggccaggctgtgaagaaacagaagtgctcacacattgctggtggggtggcaagagtgacaacccctttgaggggggatttcacatcaggttaaaaaaaaaattacatatgccctggttctgagaactcacctttaaaagacacctatgcacataatttttttaaaggacaaggttatttactgcggtgttattcacaactcaagactggaagcaatttaactgcctttccttaggagacaggttaaataaagaatgttacatctacgcaatagagtacccatacagcgctaaagaagaacaaggaatatgaaatgaaatgtagaggtttctatattattaagtgaaaagaccaagatacaaaagagtatctgtcattcattcattcatccatttatttatttatttatttatttatttatttatttatttatttattgagacagagtttcattcttgtcacccaggatggagtgcagtggcacgatctcggctcgctgtaacctccgcctcctgagttcaagtgattctcctgcctcag[217 bp omitted]acacacagacacacagagacacacacatacacacgcatagaggcttatttctgcataaagtaacacaggaagaataaaccagaaattaatgaaaatggttatttagaagaagtaggttaagaaaaggtagaaaagagaggaatgggaacaagactttgagtgtcacttttatataattttgacttctgaacaatgtaaatgttttacttatttaaaattaaattaaaaagttggaaaaagcaactcctgaaaatgaataaaaacagaaacaaaggataacataagacagaaaaaaaaagaatcaattattgcaaaagtcctcaaaaaaatactggcaaaccgaatccagcagcacatcaaaaagcttatccaccacgatcaagtaggctttatccctgggatgcaaggttggttcaacatatgcaaaacaaaaaatgtgtttcatcacacaaactgaaataagacaaaacttacatgattatctcaatagaagcaggaaaggcttttgataaaattcaacaccacttcacgttaaaaacactcaataaactaggtattcaaggaacatacctcaaaataataagagccatctatgacaaacccacagccaacatcatactgaatgggcaaaatctggcagcattccacttgaaaactggcacaagacaaggatgccctctgctaccactcctattcaacatagtattggaagtcctgaccagggcagttaggcaggagaaaaagaggagaggagaggagaaaagaggtgagaaaggaaaggaaaaaggaaagggaagggagagaaagagagaaaggaaggaaaagaaagaaaagaaagagagagaggaaggaaggaaggaaaagaaaaggcatccaaataggaagagaggaaatcaaactattcctgtttgcagacaacatgatcctatatctaggaaatctcatactcccagtccaaaagctcattaagcttataaacaacttcagcaaagtctcaggatacaaaatcaaagtgcaaaacatcactaacattcctgtacaccaacagtcaagccaagggccaaatcaggaatgcactcctatttacaattgccaacagaaaataaaatacctaggaagacagctaaccatgaggtaaagatctctacaagaagaactacaaaacactgctcaaagaaatcagagatgacacaaacaaatggaaaaacattccatgctcatggacagcaagaagcaatatcgttaaaatggccatactgcccaaagcaatttatagattcaatgccattcctattaaactaccattgacattcttcacagaactagaaaaaagtattttaaaattcatatggaaccaaaaaagagcccaaatagccaaggcaatcctaagcaaaaagaacaaagctgggccgggcgcagtggctcatgcctgtaatcccaggactttgggaagccaaggcgggaggatcatctgaggtcaggagttcgagatcaacctggccaacatgacaagagcccatctctactaaaactacaaaaattagctggaagtggtggctcatgcctgtaatcccagctacctgggaggctgaggcacgggaatcacttgaacccgagaggcagaggttgcagtgagccaggatcgtgccactgcactccagcatgggcgacagagcaagactctgtctcaaaaagaaataataaaataaaaataacatagctggaaacatcatgctacccaacttcaaactatactacagggctacagtaaccaaaacagacatagacca[131 bp omitted]accctctctctaataaaaatacaaaaattagctgggcatggtggcacacacctgtaatcccagctactcgggtagctgagatgcaagaatcacttgaagccagaagggagaggttgcagtgagctgagatcatgtcactgcactccagcctaggtgagaagaaacaccgtctcaaaaaaaaaaaaaaaaaaaaaatagagtacccagaaataaggccacacgtacaactatccgagctttgacaaagctgacaaaaacaagcaatgggggaaggattccctattcaataagtggtgctgggataactggctaccacgtgcagaagatagaaattgaactccttccttacaccacatgcaaaaattaacttcagatggattaaagacttaactgtaaaacctaaatctataaaaaccctggaagacaacctaggcaatactattctggacataagaacaggcaaagatttcaggacaaagacatcaaaagcaattgcaacaaaagcaaaaattgacaaataggatctaatcaactaaagagcttctgcacagaaaaggaaactatccacagagtgaacaaacaacctacacattgtgagaaaatatttgcaagctatccatctgacaaagatctaatagccagtatctataaggaacttaagcaaatttacaagaaaaatccaccccattaaaaagcagacaaaggacacgaatagacacttttcaaaggaagacaggcatgctgccaaaaaaaacaggaaaaaaagctcaacatcactgatcattagagaggtgcaaatcgaaaccacaatgagataccatctcacaccactcagcatggttattactaaaaagtcaaaaaataacagatgctcgggaggttgcagagcaaaaggaacacttatacactgttagtgggagtgtaaatcagttcagtcattgtggaagacggtgtggcaattcctcaacgtactaaaaacagaaatactatttgattcagcaatcccgttattgggtatatccccgaaggaatagaaatcattcttccataaagacacatgcatgtggccaggtggggtggctcacacctgtaatctcagcacttcgggaggccgaggtgggtggatcacctgaggtcaggtgttcgagacaagcctggccaacatggcgaaaccccatctctactaaaaatacaaaaattagccaggcatggtggcaggcacttgtaatcccagctactctggaggctggggcaggagaatggcttgaacctgggaggcagaggatgcagtgagccgagattgcaccactgcactccagcctgggcaacaagagcaaaactccgtctcgaaaaaaaaagagaaaaaaagagacacatgcatgtgtatgttcactgcagcactattcacaataacaaaagacatagaatcaacctgatgcccaccaatggtagaccagacagagaaaatgtggtacatatacactatggaatattatgccgccataaaaaagatcgagatcatgtcctttgcaggaacatgaatggagctgaaggccattatccttagcaaactaatgcaggaacagaaaaccaaataccgcatgttctcacattctgtaggttgtttgttcactctgttgatataagagagagctaactggtgagaacatatggatacatagggggacatgacacacactggggcctagcagagggaggaagctggaaggaggaagaggattaggaaaaatagtaagtgctaggcttcatacctgggtgacaaaataacgtgtacaacaaatccccataacacaagcttacctatacaacaaacccacatatgtacccctgaacttgaaagttaaaaaataattctaataactttggaacataataacctcagcattcttagtagattagtctacacttaaaaagactcaaattttgaactcagtgtttgtcgtggtaccttatagtaattttgaaaccattttctgtaaactgtaaaatagaccaaatgagtaaaaacatactgatgcttttggaaactaggattctcagtgtgagagaaagaaaatacaaatttggaatgtggaaaataaggaagaaaggtgtggtgttagatttgaatcagaggcttctattttcaatcatagtcacaagtataaacttgtgatttcacaaaaatctatttcttagccaaatcccaccactgtttttatacagcccaaaactaaagatggtttttacatttttttcttttttgagacagggtctcactctgttgcccaggcgggagtgcagtggcacgatcttagctcactgcagcctccacctcccaggttcaagcaattctcctgcctcagcctcctgagtagctggactacaggtgtgtgccaccacgcctggctaggttttatatttttagtagagatggggtttccccatgttgcccaggctggtctcgaattcttgacctcaagcaatctgcccgcctcagcctcccaaagtgctgggattacaggtgtgagccactatgcctggcctgtttttacatttttaatgtaaaatgtaaaaactataactattcttgtggtgagaatggaaactcaaagacttgaagacattatctcttggcctgcaaagactaaaagatttattatctgtaggaagtttactaacccctgaactagactataaaattgttagaaatatttaaagtaaaacaggagaacttaaatgtgttatgcctcatttagtctcaatgattacatcactactaactggttgggtgttatgtcaattcaacatatgtaagcagatagatcatcatacacacatgtgcacagacagcctcaaagaaagataggagggttttcaggcctcaaaactcaaacaaatcattgggtactaattccttcatggtattacctttggtgccttttcaccttttctttcatattgatttcgttgttgaattttctcagcaatttcttgggcaatttgacaagtagaatcgtatgtggagaacctgc[137 bp omitted]tgcctcagcctccccagtagctgggactacaggcgcccgctatcatgcctggctaattttttgtatttttagtagagatgaggtt[139 bp omitted]tttgacattttcattctagccaaagaattcaaacagaggggaagaataataacatgaccagtaaaagcaacatggactgagcgttatttaccatgtgccaggcactattttgaaggcttcgttagtaataactcacttaatcaaaacaggaacgctatgaagtgggtaccattaccatctccaactcacacatgagaaaaggaggcacaaagagttagagtgacttgcccaagtggttctgcctgctgcaaaccaaggccgtctggccccagagccggggctcttaacaactgtgctgttctgccaatgagaaagcatgtggggggtctccgctgcactgggcactgttctgggcactggagaagacggcagtaaacagaatgaacacagtccctctttcaaggagctcatattttaaggaaagaaagtcataaaacaattaaatacatagtatgtcaggtgttgataggtgctaagaagaaaaacgcagcaggataaagggacagagagtgataaggagctgctacttaggatcaggtgacaccgaggcaaggtgaagaagctgggcttgcagatgcctgggggcggctctagggtgcaggaacagcaagtattgtctagcctaaaaccaaatgctccggggacaaaggccacacacccacctgacatctgagcttgccagaattctctcaaaacatttaataagcttctagttgtcattcagcagcgttggaggctttgaagggttcacggtgaactcccaatagccccttatgttttgcttctctcagagcatttttact[133 bp omitted]cccgtctcaactaaaaatacaaaaaattagccaggcatggtggcgggtgcctgtaatcccagctacttgggaggctgaggcaggagaatcgcttgaacccaggaggcgaaggttgcagtgagctgagatcacaccattgcactccagcccggcgacactgtgagactccatctcaaaaaaacaaacgaacaaaaaaacgaaaatacttaagcatgcatacacatttcatttctcctatcagacagtctgctcctaaaaagcagagactctgtggactaacatgaccagcattatcttccaggaccagtccatcacaaaatatcagaaactcctgttgcccctaatgtcctaatttttgcttgagtaaacaatatattttttaaaacctttcaattcccacatatcatttgaacactgagggaacttgataagtgtttttttttaaatgaaggaaaatgcgcccatcaattcccttaggaatcttactagaataattatagcaatagtaacagctgagtacctgacctgagccaggtcctatactaagagctttacactgtaaacttcataaggatcctgagagaggatcctgaaccactaaccactatactgtaaagcagcaccattcatgtatatatcatatatatatcacacacattcacatatatcatatatatcactgatacatatattcatatatatcacatacctatcgtttatatcatatatactatatattcgtatatgtcacatgtatatcattcatatatatatattcatgtatttgtgtgtgtagggaaaaatagcagtgatacaagaaaacacagaattaagaaaacaggaggctaataaggaaaattgggtcctggtccaaactttgccacatttcacttttttttcctccatattatcatgaaaagaggagcctaggtctggctctggggtccagaccatacatataaaaatcatccacatatggtaagttttgcctcctgccaaatgtgggatctaagtggtaagtacgtctggagttcagaggtggaagagattactgctgaccaaggcactcagatggagagggtccatgaggttacatctggatgaccacgaagttaaagcaggtctcttattcagacaggagggaggagcacattctagacttagtgaaagacagggcgagcaaagatgaatggaaggaaacgtgcccggcacatttggctgcgtggtggccctggaagcctgttaagtataaaatggtagagatgagtagaagctagtttctgcagagccttgaacaccagtctaacaaggttagacttaaaggagaatttcagagccatagagaacacttttacacacagagagtggccctaaagaggttatgagaaatgcacacagctagcacaaactcccaggtgtcctgactccagtccttgtgttgttattttagccctaaagagcaatagttctgaaacaagttggaatcactggggaatctttaaaaaaataacaatgcctggtcccaacctcagcattctgactcaactggtatggggtttgtcctgggcgtgcgtggggagctttaaaagctctccaagtgattccaatctgcggtaaagtccgggcgggaacccttggcctggggcaatagacaacctcattacactatcaagcacacaggtgcctgaagtactagtttagaaaaagtaattgggtcggggggtggctgaggcaggagaatcgctggaacccgggaggcagaggttgcagtttgccgagattgtgccatcgcactccagcctgggggacaagagcaagactttgtctcaaaaaaaaaaaaaaaaaaaagtaatctgggccgggcataggcgtagtggctcacacctgtaatcccagcactttgggaggccaagacgggtgatcacctgaggtcaggagttcaagaccagcctggccaacatggcaaaaccccatctctactaaaaatacaaaaattagccgggcatggtggcgggtgcttgtaatcccagctactcgggaggctgagataggagaatcacttgaactcaggaggcagaggttgcagtgagccaagatcatgccactgcactccagcctgggcgacggagcaagactccatctcaaaattaaaaaaaaaaaaggtgtggagggtagagatgaaacaagaatggcagaatattgataatcacagaaattgggtggtgagtatgaaaggggcccattatactattctagtttgtgtatcttttaccttccaaaataaagtttttaaaaagcaattcaacacaaagaagaccatgctaccaacataaaaagtccaatcaggatataaaactattaaggtttaactgtaatttttctggaaatggtacatcatcaacaaattagttaccctggaggtaaagctaattaacattagcaaagagccagttcagagacagtgatcatgggctccttctgttaaacagcgagcttaccacttgctttgataggccattaaaatagtaactgctatattccattgctagacactgagggaggtgccaatgacctatgattttagcaacacaaaggtaaagctgtagttgaatctgtttttataggttgtttttgtttgtttgttttgttttgttttgacatggagtctcgctctgtcgcccaggctgaagtgcagtggcgcaatctcggctcactgcaacctccacctcctgggttcaagtgattctcctgcctcagcctcctgagtagctgggattacaggtacacaccaacatgcccagctaatttttgcgtttttagtagagacggggtttcaccatgttggtcaggctggtctcgaactcctgaccttatgatccgcctgcctcagcctcccaaagtgctaggattacaggtgtgagccaccacacctggccttttataggtttttcaagtcccttcccatactcctttctacccccctaatcagcgacccattttgtgctttgggagcacagctgagtgtctcactgtttcactctcaatagtccaatgagaaagccacttcatcaaactaatgaagtataacagaaaaagtctcaatgctttatcaacattaactgcggaagaagcttggggtccagtgatagcttccaccaatctaaatagataactgggggcctgtcccttatctttgacctttatttcctacttgatttgtaaactgagggatttaggttccagaaggtggagggcaacttaggaatatgtattgtaaaccaaaataaaattctaagcccacccccaacacccccccccacccccgcaaccatctgaacggacccctactctaaggcaagggcattccaaagttaacctgaaacactggttcaggccatgatgggaagaggggatcagacatgcctcattatatatcctctcctcctttttggaattcaggaaaagccaaccagcattaacgtcaatacagaccttaagtctgataagaaacacttacaatgtattctctctaaagcctgctacccagaggcttcatttgcataataaaatcttggtctccactaccccttatcataacccagacattcgtttctattgataataactcaaccaattgccaatcagaaaatttttcaatctacttatgacctggaagccccccacgcccttcgaggtgtccctcccttctggattgagccatcataaatcttacatgtattaattcatgtattattctccctaaattgtataaaagcaagctgttccccaaccaccttgggcacaggtcttcagaacctcctgaggctgtgtcatgggtgcattcttaaccttggcaaaataaactttctaaattgactgagacctgtctcagatactttggggttcacagtatcaagggccttaaaaatgtttatacccttgagcccaacagttctatttcactttcaacagtctaatgagaaagccacttagtcaaactgattgagaataacaaaaaaagtataaatgcttcactttcaacagttctaattcctacttctagacagggagcccaaggaaataagagatagaacaaagggactccctttgcaatgataaaacaaaacaaaacatcagaaaaacaaaaaactaataggagaaaaataaattatggtcattcatgtgatgcattattttgcaacataagacaattatgaggccaggtgcggtggctcacacctgtaatcccagcactttgggaggccaaggcgggcagattgcctgagctcaggagttcaagatcagcctaggcaacacggtaaaaccctgtctctactaaaatacaaaaaattagctgggcgtggctgcgtgcgcctgtagtcccagctactccagaggctgaggcaggagagttgcttaagcccaggaggtggaggttgcagtgagccatgatcgcgccattgcactccagcctgggtgacagacagagcaagactccgtctcaaaaaaaaaaaaaagaagaaaagaaagttatgctttcaaagaatgtccaatgacatagagaaatgctgtttatattatatatatatataaaaatatagattaaaataacaaattcattgtaaaaaaatcattaatggctatttccaaattatagagttaaagatgctatttattttcctttttgcaaattttcaatattctctaaattgaatattctctatcaaggggtgtatataactgttaaaattagggattttggggttttttatttttttttgagacggagtttcgctcgtgttgcccaggctggagtgcaatggcacgatctcagctcaccacaacctacacctcccgggttcaagcgattctcctgcctcagtctcccgagtagctgggattacaggcatgtactaccatgcccggctaattttgtatttttagtagagacggggtttctccatgttggtcaggctggtctcgacctcccgacctcaggtgatctgcctgcctcggcctcccaaagtactgggattacaggcgtgagccaccaccgcgtccggcctaaaattaggtttaaaaaagtaaatgctaaattaaataattggcccaaataacctagattccaggtaactcaactttgttcttggaatccattcttctaatatccaggatgtgggcaacttaaacaattataaactatattagaaataacaacataagacacatattccaacaagaacgttatagagctgtaatatgtttttaattattaagcagaaaggtcaagtctatgttcaataacaatacgttccttgggatcaaacaatatgttccttgggatcaaaagttgcatctttcatcatgcagtccttgggattaactgctaaataaatcacccttatcagctattgttttactgcagaagctactgctaaaggaaaagacttcatgatattaactcaagaaagtgcaaaatgccttataaacaagtgcacaatttccctcccaggttcctgtatctggaagggcccccaagatctaggtcttagccccagctggttactaactggctggtggccatggattctgaacctcggtttctccacctgtgaaataagggggtttaccgggatggactgacatgctacaaaaacgttatttcgacttcacttttataggagtccagggaagcctgcaccagccagctagctccaaaaccaggatgggcgggaaatccccgcaacgagatgcagcccagaaaagctaaaggaatattcagagatttggcgtaagtcctcagctctccagcggaccacctggtctccttcccgggccacccttgcaaggaccaagtgtggcgggatgtggctgagccccctcagtaaaggaaaggtctcgctgcccctcccctcatcccgaaaggccaccagcggcaatgcgaagtgattgcctgctctccggaagcccggcctccccgaaggtccctccacgcaccgccgccctcacccgggactcaccaggggtccggtgccatcctgcagactccgcccgccgctcggactcttcctgctcttagcagctgactacggcggcccgcgcggctcactccccgcagttcgtcccgtgcgcgaccggagcctggagtttgcaaagtgagtagctagggcctcagaactataatcagagaaagcaaagcgctcccctgcggacagtacactggagcaatctactcccaccaagagacgcgaactgctaagctcagttaaaattgttaaatagaaacaaagcattttcccaggaaggtgggagcgctgcaagacctctctgtagcagttacttaaaaatttatcctgcttcaaaaacaaaacaataaacaaaacactagattgcggtgagacttgcacgctgcgtaaactcactacaacctactttaagttaactttatgatatgtaaattatacctcaacgctttttaaaaaatctttaaaatttttttcacactgctccaaacaggggcccaaagaagtatcaattatatatattttttatagcagccttcctatcagtcctgtacgcctgattacatattttttaaatgccattcattcggtgcttgattttagagttactaagaagtcacagactctacacaaggggatggaggaattagttctgcgcagttagtgccatcccctaaatttccagagaaatagcacaaaaaaaaagaagaggagtcccaccccatctctcttccagtccccataccccttcatttccaagaatgctaatgaactcgaactcggcaggctgggtttctgcgcgggcgtggagctggagcgcatgcgctcgtccgttaccataacgaccagaagacgctgcagccactagggaggagagcaaagtaatcagaacctcccaaggatggataacaaaatttcgccggaggcccaagtggcggagctggaacttgacgccgtgatcggcttcaatggtgaggcctccagcatctttgggctggctggtttaggaattcggaggacgtgtagtgcaaacaggaatagtgagacaccggggacacctgaaaggcagtgtgggacaacggcaggagccctggccagggacacgcacaggaggacccgcacagcctgacctgccccaaggccttggagagtcacttcctcgatccaagcctcagggagtgagatggtttttaccagctcggacaagcgccagcacctaaaagggaccaaatgcctcttccccaggcgggccggatgagtacgggtggttgtaacccttctcccactaggtcagcccttcctggctctgaaccccacgccgctcgcaaagccctaggctccttcgtaaccacacagaaggatgctgtctgtgtcggcccctgggaccagctaggaaatctgctaaaatcccaactggcgtaccagtgagaaagggctgggagggaacgtgtgtttgagcaaccccctgaggggatgttgttggtcctctaatcctaaggaaggtttctaaatgatgaggatttcagaccaggacagaaggggaaggggacgccagggggagctaaagcggagagaaaaagggactgggccgctccgctgaaatcttatttgtgactgcctattgttttgaagattctgggaagaaaaagctgtggggttttattgttcgttttgaggggttttggttttttgagggatgagaaaacaatgaattagattttaggagaagcaaaacttttcaaaaatgtgtgttgtgatgcctgaaagctttaagaatgtggatgcagaacaatcactgtctaaagttttaagcatactctaggacttagctcttgactcttggtttaactttaacagtctccaatagaaagtgagtgctttatacatttcggatatcagatatcttgagagttggttacaagatcattgagaaacaattgagcagcctacagtgggttgcataatgtcacttgttgagccaatgtagaaccacacacatagaactctgcaactgaggccgggggcagtggctcatgcctgtaatcccagcgctttgggaggccaaggcaggtagatcacctgaggtcaggagttcgagaccatcctgtccaacatggtgaaatcccatctatactaaaaatacaaaaattatccgggcgtggtggtaggtgcctgtaatcccagctacttgagaggctgagggaggagaatcacttgaacttgggaggcagaggttgcagtgagccaaggtcacgccactgcactccagcctgggggacagagcgagactccgtctcaaaaaataaataaataaataaacaaacaaacatacatattcaacaggttataggaggagctatgaatactcatgaaggtggtcccaacacatgtgtattgaacaaacattgatgtaatatatcactcatattcaccttgggatggagacctaacatttaaatgtattacaattaggtcctatatgtcaaaaggccttttcaggacatgacggcacgttaagtgggaagcctcagtaaactggccagaggtagtccgtggtgagtggtcttcttgccaggagaacattactgaaatcactctgttgtccaatcaaaattgttcttatggcgggttgaacagggcttcagttagtaagtgcctatgaactggacaggttgcagttgttttcatattgcttatctcaagataagtgcttgtttagctgccagagaaaaagaaaaaccttgtggcagtgtatagtttattttatttatttattttgagacggtggagtctcgctctgttgtgtaatggcacaatctcggctcactgcaacctccacctcctggattcaagctattctcctgcctcagcctccagagtagctgggattataagcacccaccaccacgcctggctaatttttgtattcttagtagagacggggtttcaccaagttggccagactagtctccaattcctgacctcaggtgatccacccgccttggcctcccaaagtgctgggattacaggcttgagccaccacacccagccacagggtggaggggtgcatggccttaggtcctgtttataatttgatatcttattgccacacagtctgtcaatcttatgatctctattttaacattaatgctgatcagttgtgtctaaaccacaaaagagagggggtataatgaggcatgtctgacctcccattccgtcaaggctgggaactctgctttaaggtgttttgggggtccctttgtccaaaaggggatctgttcagtcagtggctggggtggggcagcgtggggattggggagcttatgattttatttttagtttacaaaagtgattgagttttctgtattttgtcttcactgaaaaatgtttattttaaaaaactatactagctctaaaaaaaagagggagagagagaaaagacagaactttcataaggctcgggagagaagattttgactaggagtcagcgggtaaagattgaaggcagaatatttcgggttacagcaatagcggggggcagaggaggaaaagtggagagtgcagggcctggttgcagaacggcaaatagcttggggtggcttcagtatcagggactggcaggataacacaggaaagagaagctggaattagatttcagaggccttaaatgccaagtgattgagtttagatttcagatggaaacaaattagaaacaaaagcaaggccccttttttcactgcaacactgaaactcactatagtgttacattattcaacttgaattttgtttttgagatggagtctcaccctgtctcccaggctggagtgcagtggtgcgatctcagctcactgcaacctctgcctcatgggttcaagtgattctcctgcctcagcctcccaagtagctgggattacaggtatccaccaccacgcctggctaatttttgtatttttaataga[153 bp omitted]tgtacttgacacttgtaggtattgcattttggcaggaattaattatttaagcaaaccaaatatacttgtgttaaaaacatttaataaagttatagttattaagggtttggtcacattcatccattgactggagtaggtagcccatgattttcctattatggtatacaaagagttcttgtaaactaaaaacagcaacaacaacaaaatagatcaggagtctacaaactatagcccatgggccaaatctggcccactgcctgtttttgtaaataaagttttattggaatgtagctatgcccatttgtttatgtattgtctatggctgcttttataccacactagcagagatgagtagtctcaagagaccatattgcccacaaagcctaaaatatttactctctggacctttcttaaaaaaaaaaaaaaaaagccagaccctgtaaataggtaaataaatataaatggctattagctcaaaaagcttaaaaatgctattaaagttcatgtgcggtggctcacacctgtaatcccagcactttgggaggttgaggcaggaagattccttgaggccaggagtttgagaccagcctgggcaacatggtgaaaccctatctctataaaaaataccaaaaaatagccaggcatggcgatgcatgcctgtagtcccagctattcgagaggctgaggtgggaggatcacctgagcccgggaggtagaggctgcagtgagccatcactgtaccactgcactcctgcctgggcaacagagtgagacctggtctcaaaaaaaaaaaaaaaatgctgttaaagcagtgatggtttttgcttctcaaactggcaaaggcaaaaaaagaaaaaaaaagggtaatataataaggtgagaataagaaatggttctcaattactactgccggtattaattttacaaccttgttgaaggccagttttatagtatctattacaattcttaatgaagataatctttgagcttttaagaacttgaatcacttattcaagttttcaaaaaatttacgtgcaatgaagttcactgtgatattgtctataatagctgaaacattggaagaaaca[132 bp omitted]taacacggtgaaaccccgtctctactaaaaataccaaaaaattagccgggcgcggtggcgggcacctgtagtcccagctactcgggaggctgaggcaggagaatggcgtgaacccggaagtgctggttgcacagcattgtgaatgcactaaatgccactgaattgttcacgttaaaacagttaattttatgttatgtgaatttcactccaataatttttaaaattatattccttttgtgcaatttgatactgtacaatccttaagaaaaatggaatagatgtatataaactaatgaggaaagatgtcaaagatatattaagtataaaatgcaatttgccatacagtgtatatgatatgagcctattacagtttaaagtgtacatatgtttgagagagagagaggggatagagagagaggagagggagggagggacagagggagacagagagggagggaaagaaggcgagagagagagaaaatggagtgtgtgtgagtatgtctggagaagagagcaaagaatatgaattgtagtggacatgcgtagttttggttactcatatctgaatactattctatttgagaagtatcccaagataggtaggagctggttctattgctttagtgagagcctaaaagaggcacatattttctctcctaattccttggcagccaattgagagatgtaacataattggctcagccaatcagacattcccactccgcagttccactcttataggagtgatgcaaaggagcattgagcgttgagcagtgtggccatgagaggtctttagttcgtgtcacttggtctcgccttgctattagttctgcccatttttcaagtgtgacccaaacttcctgccagttgtgtgagcaatatgtattccttccatataattctttttctgctacatttagccagagttgactcttctagtttgcaaccaagaaccataatttttaaatgcaaaaacaaaaataaatctgaagaaatacacacctgcatgttacaaggttatctctgggcaggttgcacacctaagaatagagtagctgggtcctggggcatgtgcgcattcaagcatcatcaataaagacacattgttttccaaaacgattagaccgatttactctcccaccaagcattttatgagtgttggctttgttccacatcaacacagatgcctggtactgtcagccatcttaattttagccattttggtggatatgacatggtatctcatttcggacataatttacattttcctggttacttatgaggttgcatctctttttgtaggtttattgggttttgaatttccttcagcataaactggctatccatatcctttgctcatttttctattgagaagcatatgttttccttattgccttgtaggagttcttcgtatattatggagatgatcctttgtctattgtatacattgaaaatatcttcttgtttgtgtttttctcttcatccttccaataacaatgtctttagtaattaaattttttgattttttgagaaagagtctcactctgtcacccaggctggagtgcagtggcacaatctcagctcactgcaacatccacctcccaggtttaagcgattctcctgcctcagcctctcaagtagctgggattataggtgtccaccactacgcccagctaatttttgtatttttagtagagacagggtttc[133 bp omitted]taaatatttcagccttttcttttatgatttgctctttttgtgtcatagttggaaagtcatttcttacttttgtacacactgtcttgtttttcacatttaggtctttgatctacctggaagatattgtttgtgtaaggtgtgaattatgaatctaagtttaatttttccatatggatagccatatgattgtttataaagaacctgcaattagaaaactataaaaaatttttagtaggaatagatcaccctaaagacataaaccttggtattataagaacatactgcataaaaaaggaacactcaattaaaatgaaaaaaaatcatttattcaataattacatttggccatttgagcaaaaataatccatttagctacaggaatcacataaagcaccaaaataaattccagagggagttaaatataaaagaagcattcatttaagaacaagaagattatattaataaatatttatgagtctttcgatggagaaggagatagcaacaaaaaagttttttaaaaacccaagaataaatgtaataagaaatgagtgagatctttatgaaaaaaatggaaaatgctactagaaggcataaaaggagacttatgaagaaacatatcctgtttttaaaatagaggtattttatattattataaaaatcattttcccttaagttaatctatacatttaatactatctcactaaaaacacaatcatgaattttaaatagccaaggtgacatgcaagtttgtattgtaaaataaacacgaagagcaatcaaaaaaattctgaccataggtgagcaataatggaggacctgggtctgtttcatattaaaacatattacaagggtttataattgttgagatggttcttggtataaccaaaatcaagtttgggccacttgtcacttgaaagctaaaaactcaagagatgagctttggtgaaaggaaggttagctttattggagaagccagcaacccaggggagacaataaactagcgttcaaagaccacctcaccgagttgagtctctgaatcagggaaattagaggaataatgatcaaagcatttttgtgaaacatgtgcagtctcaggtaggcagttagtcaatatgttggggccttctgcagatgccatctgccctgttcttaccaggctggtcagcccattcccagagttgttggtcattgtattttcttttatttttgctgaaggtcctgttctcctgaaactgtttttagtgaataaactaccaactcaagcaaaacaataattacattcaagcatacaaacttttctctaacatggaagcagtagtgttaccttggcagatatttggagtacgggagttgcctgtggaaagaggtgtcaccatgaaaggtcccaggctcttcagagcacctggtgggcactcagaactgaaaccgaaagttaaaaaaattattttcctggttatattgaggcatacttgacatattaaggttgtatcaatttaaagtgtataacacaatgtgttgatagacatatacattgtgaaatgatgtctacgatcaaactaattaacatattcacttcacatagttactttttgtgtgtgatgaaaacacttaagatcaactcttttagcagattaatgcagtattttttttttaatttatttgttcattttttgagatggaattttgctcttgtcaaccaggctggagtgcaatagtgtgatctcggctcactgcaacctccgcctcgtgggttccagtgattctcctgcctcagcctcccgagtagctgggattacaggtgcccaccaccaagcccagctaattttttgtatttttagtagagaccgggtttcaccatgttggccaggctggtcttgaactcctgacctcaggtgatccgcctgcctcggcctcccaagtgctgggattacaagggtgagcaaccgtgcctggccacacaatgtaatattacttagcctttaaaaagaaggaaatcatgccatttgtaaagacatggattaacctggagaatattatgctttgtgaagtaaaataggccaaatttttatatttacccaacctttgcctgaggtagttgactcccattctccctatgcctgtgcactcacccaagcaggctgctcacactccatgcattcgtgctttttaggattacgagaattggccgtaggacttgctggaccagcatcagcatcacttaggagcttatgagaaatacagaatctcaaccccttctcagacctgaaatcagaatctgcattttaacaggatccctcagggatttttataaacatcaaagtttaagatgtgattactagatgaacgtttttgtcagtgaaataaaattacctatttccccaacttcttttagctgaactaaggcttatttttaaagtgttggccgggcgcggtggctcacacctgtaatcccagcactttgggaggc[137 bp omitted]tgaagcaggagaatcacttgaacccaggaggtgaaggttgcagtgagcccaagactgcaccattgcaccccaggctgggtgacaagtgcaagactctgtcacacacacacacacacacaaagtgttgtgttttgtactcaagtagaaaattcctggccacttctgcacctgattattattactgtgaatctctctcttttaggacatgtgcccactggtctcaaatgccatcctgaccaggagcatatgatttatcctcttggttgcacagtcctcattcaggcaataaatactaaagagcagaacttcctacagggtcatggcaacaacgtctcctgcttggccatctccaggtctggagagtacatcgcctccggacaagtcacattcatggggttcaaggtgaatacagtgaaaacgactcattgtcaatttatctagaggtgcctccctagaagaactgccccacttcaagttgttagttctatgtggcaatgtgctttattcttccttcttcttctttttgacttctcttttaacccattttcattccgtcagaccgggagtgaaggactctgatgattttatacccgaggttgcagcttgtgactgataatgctcacaaacaaaagttcccgcttaaagctgtttccattgtgttgctgtcatgtttgtagaacctgatccgatttctagaaaagtgatagagcgggctgggcgcggtggctcatgcctgtaatcccagcactttgggaggcctagacggtcggatcccctgaggtcaggagttcgagaccagcctagccaacatggtgaaaccccatctctactaaaaatacaaaattagcagggcgtgctggtgcatgcctgtaatcccagctactcgggaggctgagacagggagaagtgcttgaacccaggaggtggatgttgcagtgagcagagatctcgccattgcactccagcctgggcaaaaaagagtgagactccgtctcaacaaaaaaaaaaaaaaaaagaaagaaaaaagaaaagtgacagtactaattgtttttcaccaagaagggtagctatctcctcagatgcttttaatgcctccctatgatctgacggtgtgttcttgcccccaggcagacatcattttgtgggattataagaacagagagctgcttgctcggctgtcccttcacaaaggcaaaattgaagctctggccttttctccaaatgatttgtacttggtatcactaggaggcccagatgacggaaggtaatgaactaaacatagttacttattttctttattttttttaacttttatttcaggttcagacgtacatgtgcaggtttgttatataggtaaacttatgtcacgggtttgttgtacagattatttcatcaaccaggtgctcagcctagtacccagtagttattttttctgatcctctccctctcccaccctccaccctcaacaggccccagtgtctgtgttcccttctatgtgttcatgtgttctcatcatttagctcccacttataagtaagaacctgtggtatttggttttctactcctgcattaggttgctaaggataatggcctccagctccatccatgtttctgtaattctcatgatctcattcttttttatggctgcgtagtagtccatgatgtatatgtaccacattttctttatccagtctaccattgatgagcatttgggttgattccatgtctttgctattgtgaatagtgctgtgatgcacatacaatcatatgtgtctttatggtagaacaatttatattcctttgagtatgtagccagtaatgggattgctgggttgaatgacagttctgtttttagctgtttgaggaatcaccaccctgctttccacaatggttcaactaatctactctcccaccaacagtacctaagcattcccttttctttgcaacctcaccagcatctgttattttttgactttttaataatagttgttctgactgatatgaggtggttatctcattgtggttttactttgcatttctctaatgaccagtgatattgagccttttttcatatgcttgttggctgcatgtatgtcttcttttgcaaagtgttcatgtcctttgcctgctttttaatggagtttttgttttatcttataaatttatttaagttctgtatagatgcaagatactttttcagatgccaagtttgcaatatttgcttattttctgcaaggcgtatttccagaagtgacaagggccctgtcccctctaatgttctctcttggcccgtctgtatttcagtatgcattgtctgaaaagcctctgagaaaaataccataaaagtggttttcaaagttggctgcatgttgaaatcacctgggcagctttagggaatcactggtgcctgggtgtaccttccaagagtccgatttgattggcctgagctctaagagttatacaagcttcccagtactgtgttgaacacaagtggccagagtgagcatctgtgaggaacatggctgtgctttggtcaaggataggccaaggtaggatgtttacatcctgcgtgactcagcaagtttagagtgcaggcgtataattccactgttaacacagccatgttgccatagcatgggaaaggccatcacttggctctacaccactattgtctgttaaagggataattgccctgtggacactgtgcaggtgccctggcgcccagagaaagagagagagccagagctgtccatctttgcagatggacaagggggagccaggacacagctcagcccgctcgtgcccagagagacaaagagttaagttgctgaccctgaaggcagggtagagctggctgcgcagctgtatgtgggagatgccagctcaagcagcggaggcagggcagacagtgtgagaaagctgttgatgagagctgctgctgaataaaatcatcttccacctgcctacagcccccgagtgttctttctgctcatctacccactcacctcggacttcagcatgggctggacctggaccctgggatctgacagcatccatatcttgtttcaggtcttagtggaaaggctttcaatttcaccccattcagtgtgataatttgctgtgggtttgtcatatagggtctttatcatgttgaggtatgctccttccatacccaatagaatattttttagccacagaaaagaatttttttttttttttgagatggagtttcactcttgttgcccaggctggagtaatggcacaatctcggctcactgcaatctccgcctcccaggttcaagcaggcagatcacctgaggtcaggagtttgagaccaacctggccaacctagtgaaacgctgtctctactaaaaacacaaaaattagccaggcatagtgccggggcctgtaatcccagctacttgggaggctgaggcaggagaatcacttgaacctgggaggcagaggttgcagtgagcgaagattgcaccactgcactccagcctaggtaacagagcaagactccagctgaaaataaataaataaacaaacaaaatatattaggaagaacaatcaatgcaagacattcctatgtaaatgtcaaaggatcacaatctgtagaagaaaaatagtaacacctgaggtttgtgtgggatttaatacttcagtacacttctatgtatattttcttatttaagcttcataggtttattacaaaggaaatttatatttgtgtatagttatataacgatagttcttctcttactatatagcaagtcaacaaaattttcatgagatttcctctttttcttgtcattcacaagtggtcaccccttccctggctcattaccacttgactgtttctgataataaatgtattggccgggtgtggcagctcacgcctgaaatcccagcactttgggaggccgaggcaggtggattacctgaagttaggagtttgagaccagcctagccaacatggcgagaccccatctctactaaaaatacaaaaattagccgggcatggtggcaggcgcctgtaatcccatctactcaggaggctgaggcaggagaattgcttgaacctgggaggcggaggttgcagtgagccaaggttgtgccattgcactccagcctggggacaagagcgagactccgtctcaaaaaaaaaaaaaaaaaaaaaagaaaagaaatgtatccagaaatcccctgttaacattcttagctcaacttttttttttttttgcaagcagaaaaagccttgttttattttaatgactgatctatgtaatcaccaagagtgctatctacagacaagaaatggggagcttctatttcttagtttcttcctccttgggcaagtcttgatcttctccttcttggcccggaggtgctcttcacagtgcttgtgtgtttccttggtcttggatctgtgggcctgagcctgttcagctgggagcttttcacaggctttgtctgccgtcagctcatggatatgttccgtgagaatccagttgttttttgaatacattcccctccaccttcaggtacaagctgtgatacgtgtggtgatcaatcttcttcgatccatggtatcttcagagcaggtggcgcagaatcctcattctcctcatccaggttactttctctggcaaagggctacaccctttggcttacctatgcccatgtgcctgcccttctggcgggccaaggtgttttcccatcatccagccagggaatggacagtcacaggcttatggataattagcccatctttgatcagcttccagatctgctggtgggaggtggccttggcaatttcactggtctcattggggtccaaccagaccttctttttgccacggcagagggcactagaggcaagccccttctgaagcccaaacattctcatggctttggccactgcagcgaaagaaaagagttccaacatccttcgttcaacttaaagcagttattctcaacctttggagcacactgatattacctaggaagatttaaaaaacactgacgcctgggtcccacccccggagattcttggagctaggccattaggccaccccaatcccaccccctgtcaaagagactaggtcttgcggggaaaatggccccttaaccaaggttaatctggcaaaactgttaatctctgctgtaattttaagctgcctaaaatttgtttgcagaacattcaagaatgttgaaaaccaaaagaaagaaaggaaaacaaaccttgctgtactaaaaaaatgcaatatgcccatccctggatagtctctgtggtgagaagggtggagttctgctgattggtttggagagtcaggggtcaaccctgaatgtgtggcaggggtttattctacccaacccatctagcttctacacagaggaaaagaaacaaaagggaagctgccaattatagtggacatcctatagtttgcatgcatcttttttttttttttttttttttttgagatggagtttcactcttgtttcccaggctggagtgcaacggcatgatctcagctcaccacaacctctgcctcccaggttcaagcgattctcctgcctcagcctcccaaacagctgggattacaggcatgcaccaccatgcctggctaattttgcatttttagtagagacgggggtctcttcatgttggtcaggctggtctcgaactcccaacctcaggtgatccaccctcctcggcctcccaaagtgctgagattataggcttgagtcgccgctcccggcctgcatgtatcttttaaattttgtaacctatttatgaaactttttccattgatgtcatcatggtattcatgttgtaatgcaacctgctttttgactaactttatatgaaggacatctatgtccacacacgtagatatagatctcattctttgccataatagcatagtattccattgtacagatgtgctggaatctatttggccagatctctatgttgttgccctttgttttatctatttttaaaacaaatttgtgtttgtgcggggtgcagtggcttacacctgtaatccaagcactttgggaggccaaggcggaaaggatcacttgagcctagaagttcaagactagcctgggcaacatagggagacccctgtttccacaaaaactgaaaaatgagccaggcacggtggtgtgtgcctgtagtccagctacttgggaggctgaagtgggaggattgcttgagcccaggagtttgaggctgcagtgagtggtgatcgtgccactgcactccagctggggcaacagagagagaccttgtctcaaaaaaaaaattgtttttgaaaaattaaagctatttccggccatggcttataaagaaactgtgctgtcctactatgcaaaaggatccaaaattcaaaagcatgactcttatatccccctcaccttgaagattctactacccagaggcacttggatttttttaattgaaatacatttcacatatcataaaattgacccgtgttaaggtgtacagttgagtggtttttaatgtgttcacaaggtttgcaatcatcatccacaattttagaatgttttcaacaccccaaaaagaaaccccatacccagccaggcacggtggctcacgcctgtattcccagcaatttgggaggctgaggcgggtggatcgcctgaggtcaggagttcgagaacagcccggccaacatagtgaaaccctgtctctactaaaaatgcaaaaaaaattagctgggcgtggtggtggtgggcccctgtaaccccagctactagggaggctgaggcaggagaatcgcttgaacccaggaggcagaggttgcagtgagccaagattgccccattgcactccagcctaggcaacaagagcaaaactccgtctcaaaaaaattaaaaaataaaaagaaaccccgtacccattagcaatcactctccatccctcctcctccaagccccaggcaaccactaatcgaccatctgtctctagctttgcctattctaaaacatttctcataagtagaatcatacaatatgtggtcttttgtgactggcttctttcacttagcgtaatgttttcaaagtttatccatttgtggcatgcacagtatttcattttttatcatcaaatagtattccattgtgtagacagcctactttatcttcatctatgcatcagctgatgaactttgagtcatttccacttctaaattattattaataatggcgctatgaacattcgtgtacaagattttgtgtggacatgtcttcatttctcttggatacgaggcacttcttttgaatagtctttgatttttggttcatcatctagttatcatttaaactttttaagtagtttacctcccaatttttccacttttgatggtatctgttaatgtcccactgtggaaaagggagaatttatggctattatatgacttcctacctccctattcctggtgatcttggttataccttgatttcagaccaatgtgataatacattccatatgtagaaaagttgggaaatatagttaggtatgtttttacatgaacaagatttgtaacattttcattctttttctttaaacaccttgattcgaacatttaacataacgccccctccccagcatttttttgtattatgatccacaccctattcagtgtaggataaagttgtatgattgcacccagaagaaggaagtgtaaccctatagctgcaattctcacaatgtggttcccagaccagcagcacacacatcacctggaacttacaagaaaagcaaattctcagatcccacgtactgaatcagaaactgcggtgctgtggcctagcagtctctgttttaataattcttttgtttgtgtttttgtttttgttttttgttttcgagacgcagtctcgctctcttgcccaggctggagtgcaatggtgcaatcttggctcactgcgacctccacctcccggattcaagcgattctcctgcctcagcctcctgagtagctgggactacaggtgtgtgccaccacatccagctaatttttttattttcagtaaa[142 bp omitted]gtgaaaccctgtctctactaaaaatacaagaattacccggacatggtggtgtgcgtctgtagtcccagctactcaggaggccgaggcaggagaatcgcttgaatccaggaggcggaggttgcaatgagcagagatggcgccattgcactccagcctgggcaacaagagtgaaactccatctcaaaaagaaacaataacaacaacaacaaaaaacttttaatgtgtcaccgttgtgtcttctaatacctagtgtagttgaggagatgtcaggggtggggtaattttgttgttcgtttttaagtaacctgttgtgtttttttctttctagaaccactaagatggttgtttcttattttaaaagcctgttttctctttgactttttttttttggtccctcttattttggcagtgtggtggtgtggagcatagccaagagagatgccatctgtggcagccctgcagccggcctcaatgttggcaatgccaccaatgtgatcttctccaggtgccgggatgagatgtttatgactgctggaaagtatgtgtctgcgttcggagttttcagaactcataaattgctatattttcttgcacagaaaacatggtcattctgatctgggggaacacgtctttagtcctggataaataccttacatcatagtttttgtgattttgtactcattaaaagttctcttcactggaagtattttcactatagttattttaaaattctgtgattgctgctgaaaagattttgcttacctgcttaactgttctcaggttcttgtttgtgacagaattatctccaatccatgctcacagaaacaatttgcacaattgcacagattcacctactgactgatgtttcttcccacctgctcttgattggggtctcatgatctgatagtttgcaaatgaattctgccaggaagtttcaaatggttagactgttagccatgtaaaataattacgggcaggatcagctttaaccagctaatggtgacctagctgaaagtttgaacagaggccagtatctgcctaagggagggaataaattaatttacagattcactaattagaaccttgtttaaattagcaaattagggagggtttttttttttttttttgacagtgttttgctgtgtcacccaggctgtagtgcggtggcatgatctcagctcactgcaacctccacctcccgggttcaagcaattctcctgcctcagcctcccaagtacctgggattacaggtgcccgccaacacacccggctaatttttgtatttttaatagagacagggtttcaccacattggccgggttggtctccaactcctgacctcaggtgcctgtttggagtttgaagggaaggttaaatatgaattttagaaatccttttttaatgttatataccagttcagagggcaagaaatcagaaaatacagagttgaagtatgtgttcagtagaactatttttttcaacccatcttggaaaggtacacatggttggttacttttccagctagagaagagaatttgtgcagctctacatctatattgtttcctgtccccgctttatgatatgcaacttacatttgctccatggctaattatgaggaacgattcattcagaggccatgaagctaattgaccggcacgaaaaccagccctaccaagcaacctaaagcaactgaccacgggctgtggcgacactcttcaacttttttcagatttgcagagtgatttgactaagccagggttttatagggttctttctgctccttcacagccccttaagcagcaggcattggtccattctgaagtccatgagcaacatttcttcaggactcaatacttgaattttatattaaaaaaaaagtttttttaggacaatctgcattctatgtctggtttgatttcatgtgacactgagaactgagaaagtgatcattcgtaagtaaaatttttgacatggcacctatgtatgctgggttctctaacttggtcccagtgccatgtattccactatattgtccccatgagatgtcctgcaagtttaagtatttcagaatccaaataacatctaccaggaagaccatgaaaaagctctttgtttaaaaaaaaaaagttcagtacgtttaaaatatgtctgagtacttactatatatataactctgggagctaaaaaaacaaaagaaaaactatatatatacatacatagttatatatatgtttatatagttacatatgtatatgtatgtagatatatatgtgtgtgtatatatatatatatatatatatatatatatatatatatatatgtacacatatagagagagacagactctcacactgttgcccaggctggagtgcaatggcgcaatctcagctcactgcaacctctgcctcccgggttcaaatgattctcctgcctcagcctcccaagtagctgggattacaggtgcatgctgccacgcccggctaatttttttgtattttagtagagatgggatttcactgtgttgtccaggctgatcttgaactcctgagctcaggcaatccacctgcctcggcctcccaaagggctaggatttataggcatcagccaccatgcctggcccaaaacttgatatatttttagattaatcttttctgccttaaaatattagctgaagtctttgtgatgttggccttgaaatttttatacaattattaattcagattaattcaacatataatgagtaaataccgaccatgtatcaagtcctgtgttagatgctaatttggtttagcttttagttgcttggtctcatttctctttccttgaagacaagactccacaccacaggtcttccctttaaaattttccttgcaactcaataccttgaaaaaaacacatttaaacttactcctcctcatggttgttgtgtgtgtgtgtgtgttttttttttgagatggagttttgctcttgttgccaaggctgtagtgcagtggcacgatctcggctcactgcaacctccacctcccaggtacaagcgattctcctgcctcagcctcccgactagctgggattacaggtgcccaccaccacgcctggctaattttttatatttttaatagagacggggttttcaccatgttggccaggctggtctcgaactcctgacctcaggtgatccacccacctttgcctcccaaagtgctgggattactggtgtgagccactgcgcctggccctcctcctcctgttgaactgaaatttgatgtcctttgaccaacatctccctactctcccacccccagtctctgataaccaccattctactgtctcatgcgttaggcttttttacactccacagctgcgtaaagtcatgcagtgtttgtttttctgtgcttgccttatttcacttaacataatgtccatcaggtttgtccatgttgtcacaaatgacagaatttcttcccattgcgtacatataccacattttaaaagtccatccatcttttgatgcacacaggttatgtacatcatggtgagtatagttcgtaatatattgtatacttgaaaattgctaacacaattttaagtattctcaccgccaaaaaaatggtaagtatatgagataatgcatatgttcaatagcttgattttgctattctacaatgtgtatatgtatataaacatcatgatgtacaccataaatatatattatttttacttgtcaattagaaagaaaagaaggccaggcgttgtagcttatgcctgtaatcccagcactttgggaggctgaagcggatggatcacgaggtcaagagatggagaccatcctggccaacatggtgaaaccccgtctctactaaaaatacagaaattagctgggcgtggtggcgggcacctgtagtcccagctacttagtaggctgaggcaggagaatggcttgaacctgggaggtggaggttgcagtgagcagagattgcgccactgcactccagcctggcaatagagtgggactctgtcagaaagagagagagagagagagagagagagaaagagagaaagagagagagaaagagagagagaaagaaagaaagaaagaaaagaaaaagaggaagacatttaataagctctgatttgctctgcccatgttccctgcttacttgtgtgtttgttttcagtagagtgggtagtgtgcacttcagagtgagacggagccaggtgtgaatccctgctctgctgtgttcaagctccgcactttctaatttgggaggggggatcataaaacctgcctcgtggtggtgttatgaggatcgaataaaagatctttcatagtgcactaggccataacgaagcctcaaaaatgtttagatctcttcccttcagtttcagggatgaagtgattattaaatgggtgtccatttgattgtggttttttgttttttttttttacatagtgggacaattcgagtatgggaattggatcttccaaatagaaaaatctggccaactgagtgccaaacaggacagttgaaaagaatagtcatgagtattggagtaagtattaatttaagtattaagtaacaattagcacacgttcctgttagcagtgctgaccaaggtgtttgtgtgtgtgtacatggggctggggataggaaagtggggtatagacataggggatgttgattgaagaagctcactttggccaggtgcagtggctcacgcctgtaatcccagcattttgggaggcggaggtgggtgaatcacttgaggtcatgagttcgagaccagcctggccaacatggtgaaaccttgtctctactaaaaatacacaagtagccaggtgtggtggtaggtgcctgtaatcccagctacttgggaggttgaggcaggagaattgcttgaacctgggaggcggaagttgcggtgagctggcatcatgccactgcactccagcctggacaacagagtgacactctgtttcaaaaaaaaaagaagaaaaagttcacctctgcacctctgccactccctttaggagtcagggaagagtcacctagacacagcacaggtaaaccttgttttgctggaatctaggctgtcatcaaacaccgaaagcctgcctcacctggatgaaagcaatgcagcccgtggcactcagagcccacagcacattcctatgccactgatgctatttctgccactgaaaataaagtttctgaccatgaaatccattgttgaaatgcaatctcttccataaagagaaattattaatatattttaaatgtgggtttatatattcaggttgcatattccttatctgacatgcatatagccagaagtgttttgaattttggattttcttcagattttggagtatttgcattatacttccaagttcagcatctctaatctgaaaattcaaaatttgagatgtgctaatgagcatttccttggagtgtcacatcagcactcaacaatttccgattttggagcatttcagattttagatttttagatttttggattatactcaacctgtataacttcattctccatggactgattcctcttgtttaatgcatagtcattttatggatataagctttggaaaatatgagataaagcaaatgtacatcctttttggaggggcacacctttatcctaggagcccttaagagatgtctcaaaattctgaactggcagaggatgcctattaacatcagaaccagatagacttcaagtgaaaggcacaggctaattggggtcgaatatttcctcccattctatgtgtagcccttaccctgctcccctcagagctgttctgacccatctttgagcctggggaaatagaagcagccctgagcatctttgtaagtcttcatggggtgccagaggaacctcatcccattcctgaacaggtgttcatgggcatcattcagggcatccaggtcttcaagttttcttcttctttttttttttcctgagacagagttttgctcttgttgcccaggctggagtgcaatggcacaatcttgactcactgcaacctctgcctcctgagttcaagcgattctcctacctcagcctcccgagtagctgggattataggcatgcaccacgacacccagctaattttgtattttcagtaga[133 bp omitted]tcttcaggtggatgatgatgatagctttttctaccttggcaccacgactggagatattctaaaaatgaaccccaggactaaactgctgacagatgttgggcctgcgaaggacaaattcagtttggtgagtagagaccatcgccactgccctgccatttttctcccttcactggcagcatgtacttttttttttcctttttgagatgcagtcttgttctgtcactcaacctggagtacagtgacgtgatcttggctcactgcaacttctgcctcccaggttcaagcgattgtcccacctcagcctctcaagtagctgggactacaggtgtgccccaccacacccgactaatttttgtattttttagtacagacagggtttcatcatgttggctaggctaatcttgaactcctgacctcaagtgatctgcccaccttggcctctcaaagtgctgggattacaggtgtgagccaccatgcccggacaaagcacacactttgtttgtttgtttgtttgtttgtttttgagaaagagtctcgctctgtcgcccaggctggcgtgcagtggcgagatgtcggttcacagcaagctccgcctcctgggttcacgccattctcctgcctcagcctcccaagtagctgggactacaggcgcccgccaccacgcccagctaatttttttgtattttttaatagagacggggtttcactgagcacacactttcttaatgaagaaagagtttgtgggaaaacataaaaagtcagtgatggacccaaagccacatctcaatttgcaaggtacattggccagttctctatgccctcgtctctggtttttattctgggtaaagacatttctaggtgtcctgaattagggaatcagaaccacatttccagttctgtgaagaaagtcattggcggcactattcacaatagcaaagacttggaaccaacccaaatgtccaacaatgatagactggattaagaaaatgtggcacatatacaccatggaatactatgcagccataaaaaaggatgagttcatgtcctttgtagggacatggatgaagctggataccatcattctcagcaagctattccaagaacaaaaaaccaaacaccacattttcttactcataggtgggaattgaacaatgagaacacatggacccgggaaagggaacatcacacaccagggactgttgtggggtggggggaggggggagggatagcattaggagatatacctaatgtaaatgacgagttaatgggtgcagcacaccaacatggcacatgtatacatatgtaacaaacctgcacgttgtgcacatgtaccctaaaacttaaagtataataataataaaattttaaaaaaagtaccacatttatgttcacctcttcaaagcatagggcctattgctttgtgattttaaactgcgttggttccagccccattgccatacataagagaagtgtgctctttgatctataaaactatatatataatttttgtctactttactaactagatcttagattttagcctcagctgacattataagtcgtgagcaagacctagaaatagtcaactgtttatatttacagacttcctagcaattctagttaaaaggacagttagagactttgatatttataccaaaataaaaagctaccatcaaaggataattttatataacaaatgctgctatttccagcaccccagtaacttatcagggctgtttctactaaactttgaatttgaaagcttgtactatgttctgcacctgcctatctcgtttctgataacagaacagatggttctaactaagcttagatacttttccacatagcagatattctcaagaaactttgaaatactgcactgtgttcctgggaaaatgtcacagttttcttagtcacataatcatttaatattcaagcattcaaggagatgcataaaaagagggaaaaactatagtataagtagagaagagtttagaaataatgctacaagagattgaagtgtagcttttcaagtgtggtttttctaattctttttaggataggaattctttttttattattatacttcatacatgtgggatacatgtgcagaccgtgcaggtttgttacataggtatacacgtgccatggtggtttgctgcacccattaacccgtcgtctacattaagtatttctcttaatgctatcccttttctagcccccacccctgacaggccccggtgtgtgatgttcccctccctgtgtccatgtgtcctcattgttcaactctcacttatgaatgagaacatgcggtgtttggttttctgttcctgttttagtttgctgagaatgatggtttccagcttcatccatgtccctgcaaaggacatgaactcattcttttttatggctgcatagtattccatggtgtatatgtgccacattttctttctatccagtctatcattgatggacatttgggttggttccaagtctttgctattgtgaatagtgccacaataaacatacatgtgcatgtagaatgatttataatcctttgagtatatacgcagtaatgggattgctgggtcaaatggtatttctggttctagatccttgaggaatcaccacactgtcttccacaatggctgaactaatttacactcccaccaacagtgtaaaagtgttcctatttctccacatcctccccagcatctgttgtttcctgactttttaatgatcgccattctaactaacgtgagatggtatcgcattgcagttttgatttacatttctctaatgaccagtaataatgagctttttctcatatgtttgttggccgcataaatatcttcttttgagaagtgtgtgttcatataggataggaattctaatatattaaacaaataaaaacaaagcacatcaggttaaggagagcaagtcttagagccctgccagtgccaactcctgagatgcctccaaagagctccatgtaacactacctgaaaactagtggattttttgttttgttttgttttgttttcctagcacttgggaacgaaatatctgtccagcaaagatgctggctatcttaggtttctcaaacctttggcacttaag[140 bp omitted]tgactca[222 bp omitted]attgtcacgatatgagttcttcttaatttgaactatagatttactgcaatcccaataaacatcccagcaagttattttgtgtctgtagacaaactgattctacagtttacacagaggggcaaaagactccgactagaaagcacaatattgatacctaatgtagatgacgggtaatatagatgatgtagatgacgggttgatgggtgcagcaaaccactatggcacatgtacacctatgtaacaaacccgcatgttctgcacatgtatcccagaacttgaagtataatttttaaaaaaagaaagcacaatattgaagaagaacacagttggaggagtgacactaccagatttcaagacttaccataaaactacagtaatcaagacagtgtagggttggtgaaagaatagataaatggatcaatgggacagaatagagagcccaaacatgaattcacatagtcaactgatcattggtgaaagagcaaaggaaatacaatggaaaaaaagatcgtctttttaataaataatgctaaacacctggaaaaccaaaaaataaaaataaaaaagcctagacacagaccttatacctttcacaaaaattaactcaaaatggattacagacctaaaacacaaaacaatagaactcctgaaagataaaatccagaagacctaagatgtggtgataacttttagctataatacccatgaaagaaagaattgaaaagctggacttccttaaaatcaaaaattctgctccatgaaagacactgtcaagagaatgaaaaataaagatacagagtgagaggaaatattggcaaaagacatacctgaataaggactgttacccaaaatatacagagaacttttaaaactcaacaataagaaatgggccaaagaccttaactgccacctcccctaaagaagatatacagatggcagccgggcgcagtggcttgtgcctgtaatcccagcactttgggaggctg[133 bp omitted]tgaggcaggagaatcacttgaacccggcagtgagatcacgccattgcacttcagcctgggggacacagcaagactctgtctcaaaataaataaataaataaataaataaataaataaataaataaataaataaataaaagaagatatacagatggcaagtaagcatatggaaagatactctatgtcttatatcagccgggaaatgtaattaaaacagcaatgaggcacgactacataccttttcaaatggccaaaatccagaacactaacaacacctaatattgacagagatggagagcagtgagtactattgttcattgctgatgggaatgcaaaatagtacggccactttggaagatagtttggtggtttcttgcaaaattaaacttactcttaccatgtaatgcagcagttgcactccttgctatttacccaaaggagctgaaaacttatgttcacacgagaacctgcacacagatgtttacagaagctttatccataattgccaaaacttggaagcaaccaagatgtccttcagtaagtaaagggatacgtaaactgtgatacatccaaacaatggcatattaatcagtactaaaaagaaatgagctataaagtcaggaaaagactttataggaaaagaaggaaactgagatgcacattactgagtggaagatgccagtctgaaagactgcacaccatttgattctaactatatgacattctggaaaaggcaaaattatggagacaataaaaagatcaggctgggcgcggtggctgacaccactaatcccagcactttgtggggagctgagacgagcagatcatgaggtcaagagatcaagaccatcctggccatctctactaaaaatacaaaaattagctgggtgtggtggtacatgcctgtagttccagctactcgggaggctgaggcaggagaattgcttcaactcaggaggtggaggttgcattgagccgagatcgcgcccctgcacttcagcctggcgacagagtgagactccatctgaaaaaaaaaaaaaaaaaaaaaaaaaaaaatcagtgcttgccatgggttagcagggagggaggagtgaatgggtaaagcacagaggatgttttgggcagtgaaactattctgtatggcactataatggtaaatatatgttgctattaatttgtccaaacccagagagtatgcaatgccaagagggaaccctaatgtacacaatggattttgggtgataatgatgtgtccacataggtttattagctgtcatacatctactctgctggaagatattgataatgggagaggctctttaactgtgggggaaagaagtattggggaaatctcaaatacttgtatcttctgtttaattttgctgcaaacctaaaactgctctaaaaaaaatagcctagtaaaaacaaaaatagtccaggcaaggtggatcatgcctgtaatcttagcgctttgggaggccaaggcaggaggatcacttgaggctggagtttgaggccagcctgggcagcatagaaataccctatttctgtgaaaagtttttaaaaattagccggcgtggtggcatgcatctatagtcctggctactggggaggctgaggcaggagaattgcttcatcccgggagttcgtggttacagtgagctgtgattgtgccactgcactccagcctgggtggcagagaccctgtctccaaaatacacacacacacacacacacgaacatgcaaatacaaaaatggtatctgtcaataaatgctgatgtgtcagacatggtgcaaaaccccttccttaaatgatctcattcgatcttcataaacgcctaatgagataggtaccattttcatccctgctttacagatgagaaaactgaggctcttaacattggaaatctcctggcttgcaagtaatagagctgagatttcaacccaggccgactggctgcagaacctgtgcacttgaatgacgtcatctatagttttaaaaagtttatttagaaatcacacatatgtagcttcgaggcgctgttgaactctttaccacttgcatccccaagtccccagataaatgctaaaaaattcactccatgttttgtctcctcataggctgagccttcatcctgttgtcctgctgaggcacttaggaagttaggggtgaggggtggaagctggggagcatgtaattctggtccttgccttcacattcttgagccttggtttctcttctcaatcacaaaatgtcttttgagccacaacaggctaaattcagtgtaaagtaacttgaaagggcaggatatttgttttatcatattcaaaattcattaagacacaaacctatacagtcactagctatactgaatgttttaaaatcaaatgttgtggctgagtgtggtggctcacacctgtaatcccatcactttgggaggctgaggcaggaggatcacttcaggtgaggagttcgagaccagcctggccaacatggcgaaaccccatctctactgaaaatacaaaaattaaccaggcatgatggcgcatgcctataatcccagctactctggtgggtgagtcacaagaatcgcttgaacttgggaggcagagagtgcagtgagttgagatcatgccactgcactccagtctgagtgacagagagagactctgcctcaaaaaaacaatagtaataacaaataaataaaataaaatattgctcacgcacattttaaaattagaacttcacagtggatactataaaacaaccatcatacattgtcaagccttttttttctttggagagaatggtggggggcaccccaacctttgaagagcactttaaattttaaatatgtttcccactcttatgtagtacatgttgtagttcagataatacagtcgccaaacaataagaagtctattgtgctttcttgggatattaaatatggtccctttgcatttgtaagaattaagttctggtgaaaacagtggcagctgagagactagcattgctgaggttatgcttataccttctcttggctgcatttgagtggatgtaaaagtgttaatttttaaaatattcaaaatgcaccagtggttttagggaggaaggatggtgaagcctgtttgcatcctgtaggcccaggagggttacttcctggcaagtgagcttgttgttggcactgaatccccttggtcagcctgggggtgcatcgcgagcagaaccttcatgaacatcctccaggcaatgtgtgcagcactggcatgactttggccatctttaattcatctttcattcagcttttttctttttttcattaatatttaaaattttttttattgccatatgtttttggggaacaggtggtatttggttacatgagtacattctttagtggtgatttgtgagatttttgtgctttttcttaacacagtttttccccctagggagtgtcagctatcaggtgcctgaagatggggggtttgttggtgggctctggagccggactgctggtcttctgtaaaagccctggctacaaacccatcaagtaagttccgggtctcacacagtggggctgggtagagacccactaaacggagatttgcttaaagccagcaactcgatgatatcggcaaagtgatatttggttaaaaaatttcatcttgctgttagaatgagtagttggaatcacaatagatggtggcttctttgtcaacgaaaagacaaaagcttatgttgaatcaaaccaaagtagtccactattacccagagggacactgcccatttaataaatacataagtttgtatttagctaacacattgagccatgatgaaaggaacgggatgttataaacttatccaagaaataacccccaatgttaaatgttcaaaattggttaactcaatgaaatttattatgcaatgggtacctattatgtgcaaagcattgtgttaatcatgcatttgaatacaatttataatagaaatagccagcattcaccagccatttctatatgccagatactctgctatgtatgtttcttggctcatttaattaaaataaaatgaaacaaaaccttatttattgccataacaatgtgcttattcagcacctcctccaaccaaaccaatgtattagatactattaataaaataaagaaaaataagctatggtctttgtcctcccagaacttacagactcgtttggggctaaggtatgtacacacgaaagaagtcactaccagacaagataggatattagcacatggtccagataaagtaaaatatattatgaatgttgtagagatcagagaagaggatgaccttctcgggatggaaagatcagggaggacagttcacagagggatgggcttaaacaaaaaccagataccccacacatgtgctttatggcctctgctacccccaggaagccaggggtagttgcacacatgttgtagaaatgagcaccagctgtcttcattccaagaaatctgtgttgaacattcacggggtaccaggcatcattctaggtgcttaggatatctcagtgaataaaacataaaagatgaaaaaaaaaatccctgtcctcatggagcttacattctagcaggaaggaaaaggcaataaataagaaacaaaataaacaaggaaagtacatagtattagagggtgataagtacaatggagaaaaatgaagtaggatgcagagtaaggggattatggtttgaatagaagcagggaggccaggtgcagtggctcacgcctgcaatcccagctctttgggaggtcgaggcaagtggatcgcttgagcccaggagttccagcccagcctgggcaacacagtgaagcctcatctctacaaaaaaatacaaaaattagccagatgtggtggcacatacctgtagtcccagctactcaggaggctgaagcgggaggattgattgaggttgatcagtcaacctcaaggttgaggctggagtgagccatgatcatggcactgaactcagcctgggtgacagaacgagacctcgtctcaattttttttttaaataaaaaagcagtgtatacattgccattttaaattcagtggtcaagattgggcttattgagaatgttttagaccagtttcatgcttgtatgaagggaaatgagggagggaggagtctttagaacaatattggaagccttccaggttattatacatgctcaagtttgaaagccacagccccagagaatgctgggagcagcattcatcaggagcctggtgcctggacaacctcatggaatagacacttataaaacctggaatctgatttctggagagagagagagagagagagacagagacagagagagacagagagagagagaagctcctctcttaatttacaaccgaacctgaatcctaatacaggtgaggtgggggagaggaatgatgagaaacttaaccttaaaatagcaacaatcaggagaggaaagaaataacatccaagtattgtcgataatacaagatgcaagaaataaaatcaagtaaaaaacaaactatgttgggttatctctggatgtatgaagtgaatatagtaaattaaccttctaattttttacccctttgtttttagtgtgtgtacattcccattatgatgaagataaactcaaagtaattatcaccaggtttgtgctatcactgtttccaaaataaccctgtgtgacagtgcagaattaaatcagatgcggtggtttccacctgctgggctttttgtagattgaaaaggctgctcacatgagaagtcatggagactggaaagggaagatgtatgatcaaaatggacagctccagtgccaagatctttcctttccccattttttttttttgtttgttttgagatggagtctcgctctgttgcccaggctggagtgcaatgacgccatcttggctcactgcaacctccgcctcccgggttcaagagattctcctgcctcaggctcccgagtaactgggattacaggtgcccgccaccaagcccagctaatttttttttgtatttttagtagagatggggtttcaccctgttggccaggctggtctcaaactcctgacctcagatgatccacccaccttggcctcccaaagtgctaggattacaggtgtgagccaccatgcccagcctgttcttccccttttatccctaggcttcattttgtcttctgaagttcccagatgccaatagccagtatttctttgttgtcatctgtgggctagcaacagatataaaggagcaacatcttcactgcaacacttgtaaaggaggaattattctgtggttgagtaaactgaggccagaggtttctgacaacttgtccagagtcacaaacctctagttagtgcaagaactgaggtttaacttgtcatcttcctttcgtcattaactgttctgtgtcccaccaataaatctctaaaacactgtatttcccatgctggcttcttgcacaagaacctgcgttgaattcttcattgtctaaactaaactagttacagagagagtctgtatcctagggcctcattcatgtatatactttttttttttaagttcatactcattataaagggaagagggagaaatctgaaatgtagaagaggaaaaaccaactccttaaggttctggcaaagacaacccctagtttttcttttttttctttttttgagacagagtctcactctgtcatccaggatggagggcagggatgagattgtgactcactgcagcctccaactcctgggctcaagtgacccttctacctcagactcccaagtagctgggactataggtgcgcaccaccacacctggctaatttattttattttattttttatttttagagacagggtcttgccatgttgcccaggctagtctcaaactcctggcctcaagtggtcctccttgcctaggccatccaaagtgctgggattacaggcatgaacaactgtacaagctctgaaatgattttacttataaataaaatgttgtattctaattttttacttaatgcaagcatcataaacattttcagtattatgatgtaatctttttattatggtaacatatacacgtactacataatcttttaaactttttttaggcaaatatcctatgaagctgatgttccatagatcatttaactattccattacaactgggtatttaggttgtttccaaccttttactctttcagatagggttatcatagcatcctttgacgtaaagcatcttccccctgattttaggattatttttcagaagtggaattaataaaggggttagttgctgtggtcatttgtacccatatgcctgcctggaatattccctctacccaaatcctgcctgcattgcacaacccatgtcaaaacgttatctcactgaagaagctttcctgactactttaacctatgctgacctctggctttgctgttcgtgggtacaccaacttgtgagtaactcctgccttttcaactgtgtcacttctgtgagggcgtgtctgaaattatatgcctgatttgtatcctctgccatgcttcacatgattcgtaactacttactggttgagtgaatctactttacttttgtgcttctccctaaaggaagattcagttacaaggcggcatcacttctatcacacttcgaggagaaggacaccagtttctcgtaggaacagaagaatcgcacatttatcgtgtcagcttcacggatttcaaagagacgctcatagcgacttgtcactttgatgctgtcgaggatattgtctttccattgtgagtagaagagaaaaacaagaatgtggagatttgatgcagtgtgccagggcatttaattttatgaatgcattttcaatattaatgaacatagttatgatttttctccttaaatttttctaacgtggtgaattattttaagagactttccattgtctttgccatgcaattatattagctttccaattcaaatttgagtttctttagaatattgacttttctaataaacccctcatggaaagggtaagtacctgacaaaacctttctgttttcttaatcccatccagagaaagcttagtacagacagtccctgacttatgattttttttattttatgatggtgtaaaagcaaaatgtattcagtagaaactatatttcaagtacacatacaactattttgtttttccctttcagtacagtattcaataaattacatgagatattcgacactttattataaaataggatttgtgttagatgattttgcccagctataggctaatggaagtgttctgggtatgtttaaggtaggctgggctaacctaggatgttcagtaggtgaagtgtattaagtgcattttcgacttaggatattttcaattacattgggtttatcaggcatatagccccatcttaagacacgaagtatctgtggtacctgttttcaaacttctttcctgtcatttgtacctcttgaggtcttctagatttcacaggcttcatggtggtgggtattacgagggcttctggatctagttgctgtatttcttggtaaatctcacccagcacaagtaaaacaaataactaccagcagttttgatatcaaaaggagcttcagtcagatgttctggtatttgattttgtaacacattttgtctttggtgagattcatttcatgaagttggtcagtttttgctctgaacttcctcagtacttagcttaatttataatactcaactttcagcaagacttatattcagacctcagtttttgttttgttttgttttttgtttttggggggtttttgtttgtttgtttgtttgtttgtttgtttttgaagcggagtcttgctctgtcacccaggctggagtgcagtggtgggatttcgactcactgcaacctctgcctcctcgattcaagcgattctcctgcctcagcctcctgagtagctaggattacaggcatgcaccaccacgcccggctaattttttatatttttggtagagatggggtttcaccttgttggccaggctggtcttgaactcccgacttcaagtgatccacccacctcagcctcccaaggtgttgggattacaggcgtgagccactgcacccggcctcagacctcagtttttgagatcttgagctgtagtttccgttccctgaatccctgtgattaggtctttccacgttatttctaacagtgaaaatggctgctgctttcccactaggtgaatctttgtttgcaagttggtcattttcttttggtctcactttttcccctctttttttttaataagcactttagtagaattaatctgcaaaactgtttggccctggtgctttttttaagggtagattttaaaccatcttttcaattgcttatatagttattgatctgtttgggttttgcatctctttcttttccttttccttttctttttcttttctttctttctttttttttttttttttgagactgagtctcgctctgttgccatgctggagtgcagtggcacgatcttggctcactgcaacctctgcctcccaggttcaagcaattctcccacctcagcctcctgggtagctgggactacaggcatgtgccaccgcgcccagctaatttttatatttttagtagagatgggatttcactat[138 bp omitted]atattaagattaccacatcttcattcctttaaaataacatttactaattaggaatttttgctataatgtaataaatgaattcgtttattataaaaattcatttgtttattaaacaaattcatttatttattaaaaaaaggacttctgggaaaaattgaattaggccaggatttctcaacctccgcactattgacattttgagttagataacttgatattgtggatgctattctgtgcattaaaggatgtttggcagcattcctgggctctacccatcagacgcgagtagcagctccttccctgcaattatgacgaccaaaaaatgtccccagaccttgccaaacttcccctggtggcaaaattacccctagctgagaatcactggggttaggccagacctcttactactgatgcaattttgtaatcagagcactaacaaaccagtcacaattttaataaactattagcacagttagaaagagtttattaaattcctaataagaaagaaatactgcagtaaatataggacttcgccttttaataagtaagggtaactttctaaaaggagatttaagaagacttgaggctgctgagttgtgaatatgaactaaactaagaggaagaacatagaataaatgtatggtactgcattcttcatttacttgctaatttagttgtgttaatgttctttgttttcaattgctattactttatataccaaagcattattatactgagattaaatcatgcatgaaccaatgaaacttgtgtaatattctgttaggttggtgcaaaaataattgcagttttaccaattgcatatgagctaatattcattacagagacgtgcattgcagcaaaagagagtgtattgtcttttttcaactctttattttcaacctattagtgtttagttttaggtaagtcttagtcttttaatagaatttaattcattcataagtattactatctgataagtttatatatttttctgtttaacatgtttactctttttgtcttttcttgtagctgtcatgttttatttggttccgttttaacctttgctgcatacaacttggaaactatctactttatttgtattcatttagtggttacccttgaattgtttttttttcttttaggacataaggtcttcctctgtcacccaggctagagcacagtgacgcaatcacagctcagaactcctggggttaagcaatcctcctgccttaacctctggagtagctgggatgcaggcatgtaccaccatgcccagctaattaaaacaaaaaaaaaattcttttttttttttttttttttttttcccagaaacagggtctcactatgttgcccaagctggttttcaactgccatcctcaagcaatcttcctacctcggcctcccagagcacaggcctctcagattataggcatgagccactgcagtcaacctctaaatttttaatatacatatttaaatatagtttttcggggggaggagccaagatggccgaataggaacagctccggtctacagctcccagcgtgagcgacgcagaagacgggtgatttctgcatttccatctgaggtaccgggttcatctcactagggagtgccagacagtgggcgcaggccagtgtgtgcgcgcaccgtgcgcgagccgaagcaggtcgaggcattgcctcacctgggaagcgcaaggggtcagggagttccctttcccagtcaaagaaaggggtgacggacgcacctggaaaatcgggtcactcccacccgaatattgcgcttttcagaccggcttaagaaacggcgcaccacgagactatatcccacacctggctcagagggtcctacgcccacggaatctcgctgattgctagcacagcagtctgagatcaaactgcaaggcggcaacgaggctgggggaggggcgcccgccattgcccaggcttgcttaggtaaacaaagcagccgggaagctcgaactgggtggagcccaccacaactcaaggaggcctgcctgcctctgtaggctccacctctgggggcagggcacagacaaacaaaaagacagcagtaacctctgcagacttacgtgtccctgtctgacagctttgaagagagcagtggttctcccagcactcagctggagatctgagaacgggcagactgcctcctcaagtgggtccctgacccctgacccccgggcagcctaactgggaggcaccccccagcaggggcacactgacacctcacacggcagggtattccaacagacctgcagctgagggtcctgtctgttagaaggaaaactaacaaccagaaaggacatctacaccgaaaacccatctgtacatcaccatcatcaaagaccaaaagtagataaaaccacaaagatggggaaaaaacagaacagaaaaactggaaactctaaaacgcagagcgcctctcctcctccaaaggaacgcagttcctcaccagcaacggaacaaagctggatggagaatgattttgacgagctgagagaagaaggcttcagacgatcaagttactctgagctacgggaggacattcaaaccaaaggcaaagaagttgaaaactttgaaaaaaatttagaagaatgtataactagaataaccaatacagagaagtacttaaaggagctgatggagctgaaaaccaaggctcgagaactacgtgaagaatgcagaagcctcaggagccgatgcgatcaactggaagaaagggtatcagcaatggaagatgaaatgaatgaaatgaagcgagaagggaagtttagagaaaaaagaataaaaagaaatgagcaaagcctccaagaaatatgggactatgtgaaaagaccaaatctacgtctgattggtgtacctgaaagtgatgtggagaatggaaccaagttggaaaacactctgcaggatattatccaggagaacttccccaatctagcaaggcaggccaacgttcagattcaggaaatacagagaacgccacaaagatactccttgagaagagcaactccaagacacataattgtcagattcaccaaagttgaaatgaaggaaaaaatgttaagggcagccagagagaaaggtcgggttaccctcaaaggaaagcccatcagactaacagcggatctctcggcagaaaccctacaagccagaagagagtgggggccaatattcaacattcttaaagaaaagaattttcaacccagaatttcatatccagccaaactaagcttcataagtgaaggagaaataaaatactttacagacaagcaaatgctgagagattttgtcaccaccaggcctgccctaaaagagctcctgaaggaagcgctaaacatggaaaggaacaaccggtaccagctgctgcaaaatcatgccaaaatgtaaagaccatcgagactaggaagaaactgcatcaactaatgagcaaaatcaccagctaacatcataatgacaggatcaaattcacacataacaatattaactttaaatataaatggactaaattctgcaattaaaagacacagactggcaagttggataaagagtcaagacccatcagtgtgctgtattcaggaaacccatctcacgtgcagagacacacataggctcaaaataaaaggatggaggaagatctaccaagccaatggaaaacaaaaaaaggcaggggttgcaatcctagtctctgataaaacagactttaaaccaacaaagatcaaaagagacaaagaaggccattacataatggtaaagggatcaattcaacaagaggagctaactatcctaaatatttatgcacccaatacaggagcacccagattcataaagcaagtcctcagtgacctacaaagagacttagactcccacacattaataatgggagactttaacaccccactgtcaacattagacagatcaacgagacagaaagtcaacaaggatacccaggaattgaactcagctctgcaccaagcagacctaatagacatctacagaactccccaccccaaatcaacagaatatacatttttttcagcaccacaccacacctattccaaaattgaccacatagttggaagtaaagctctcctcagcaaatgtaaaagaacagaaattataacaaactatctctcagaccacagtgcaatcaaactagaactcaggattaagaatctcactcaaagccgctcaactacatggaaactgaacaacctgctcctgaacgactactgggtacataacgaaatgaaggcagaaataaagatgttctttgaaaccaacgagaacaaagacaccacataccagaatctctgggacgcattcaaagcagtgtgtagagggaaatttatagcactaaacgcctacaagagaaagcaggaaagatccaaaattgacaccctaacatcacaattaaaagaactagaaaagcaagagcaaacacattcaaaagctggcagaaggcaagaaataactaaaatcagagcagaactgaaggaaatagagacacaaaaaacccttcaaaaaatcaatgaatccaggagctggttttttgaaaggatcaacaaaattgatagaccgctagcaagactaataaagaaaaaaagagagaagaatcaaatagacacaataaaaaatgataaaggggatatcaccaccgatcccacagaaatacaaactaccatcagagaatactacaaacacctctacgcaaataaactagaaaatctagaagaaatggatacattcctcgacacatacactctcccaagactaaaccaggaggaagttgaatctctgaatagaccaataacaggctctgaaattgtggcaataatcaatagtttaccaaccaaaaagagtccgggaccagatggattcacagccgaattctaccagaggtacaaggaggaactggtaccattccttctgaaactattccaatcaatagaaaaagagggaatcctccctaactcattttatgaggccagcatcattctgataccaaagccgggcagagacacaaccaaaaaagagaattttagaccaatatccttgatgaacattgatgcaaaaatcctcaataaaatactggcaaaccgaatccagcagcacatcaaaaagcttatccaccatgatcaagtgggcttcatccctgggatgcaaggctggttcaatatatgcaaatcaataaatgtaatccagcatataaacagagccaaagacaaaaaccacatgattatctcaatagatgcagaaaaagcctttgacaaaattcaacaacccttcatgctaaaaactctcaataaattaggtattgatgggatgtatttcagaataataagagctatctatgacaaacccacagccaatatcatactgaatgggcaaaaactggaagcattccctttgaaaactggcacaagacagggatgccctctctcaccgctcctattcaacatagtgttggaagttctggccagggcaatcaggcaggagaaggaaataaagggtattcaattaggaaaagaggaagtcaaattgtccctgtttgcagacgacatgattgtttatctagaaaaccccatcgtctcagcccaaaatctccttaagctgataagcaacttcagcaaagtctcaggatacaaaatcaatgtacaaaaatcacaagcattcttatacaccagcaacagacaaacagagagccaaatcatgagtgaactcccattcacaattgcttcaaagagaataaaatacctaggaatccaacttacaagggatgtgaaggacctcttcaaggagaactacaaaccactgctcaaggaaataaaagaggacacaaacaaatggaagaacattccatgctcatgggtaggaagaatcaatattgtgaaaatggccatactgcccaaggtaatttacagattcaatgccatccccatcaagctaccaatgactttcttcacagaattggaaaaaactactttaaagttcatatggaaccaaaaaagagcccgcatcgccaagtcaatcctaagccaaaagaacaaagctggaggcatcacactacctgacttcaaactatactacaaggctacagtaaccaaaacagcatggtactggtaccaaaacagagatatagatcaatggaacagaacagagccctcagaaataatgccgcatatctacaactatctgatctttgacaaacctgagaaaaacaagcaatggggaaaggattccctatttaataaatggtgctgggaaaactggctagccatatgtagaaagctgaaactggatcccttccttacaccttatacaaaaatcaattcaagatggattaaagatttaaacgttagacctaaaaccataaaaaccctagaagaaaacctaggcattaccgttcaggacataggcatgggcaaggacttcatgtccaaaacaccaaaagcaatggcaacaaaagccaaaattgacaaatgggatctaattaaactaaagagcttctgcacagcaaaagaaactaccatcagagtgaacaggcaacctacaacatgggagaaaattttcgcagcctactcatctgacaaagggctaatatccagaatctacaatgaactcaaacaaatttacaagaaaaaaacaaacaaccccatcaaaaagtgggcgaaggacatgaacagacacttctcaaaagaagacatttatgcagccaaaaaacacatgaagaaatgctcatcatcactggccatcagagaaatgcaaatcaaaaccactatgagatatcatctcacaccagttagaatggcaatcattaaaaagtcaggaaacaacaggtgctggagaggatgtggagaaataggaacacttttacactgttggtgggactgtaaactagttcaaccattgtggaagtcagggtggcgattcctcagggatctagaactagaaataccatttgacccagccatcccattactgggtatatacccaaaggactataaatcatgctgctataaagacacatgcacacgtatgtttattgcggcactattcacaatagcaaagacttggaaccaacccaaatgtccaacaatgatagactggattaagaaaatgtggcacatatacaccatggaatactatgcagccataaaaaatgatgagttcatgtcctttgtagggacatggatgaaattggaaaccatcattctcagtaaactatcacaagaacaaaaaaccaaacaccgcatattctcactcataggtgggaattgaacaatgagatcacatggacacaggaaggggaatatcacactctggggactgtggtggggtcgggggaggggagagggatagcattgggagatatacctaatgctagatgacacgttagtgggtgcagcgcaccagcatggcacatgtatacatatgtaactaacctgcacaatgtgcacatgtaccctaaaacttagagtataataaaaaaataaataaataaatatagtttttcatcaaagactacagttaaccaatgtttgtatctaatctgccaaaaaggcaagagtctcagcatatttttattttcacctttcctccaccatgtcctgtgttgaaattatttggaattctagatctttgctattatcagtctctctctctctttttaacacatcaatccccttagattctttttgttttggaattctttcagaaacaatctatatacagaaaatatggtctcagccaggtgcagtggctcttgcctgtaatcacagcactttgggagactgaggtgggaggataattaaagcccaggagtttgagactagctgggcaagatggtgagacaccccttcctcatctttacaaaactaaataaataaactggacatgttggtggcactgcctctagtcccagctactcgggaggctaaggtgggaggaagtttgaggctaccatgagctacaatcacaccagtgcatgccagcctgggtgacagagtaagaccctgtttctattaaaaaaaaaagaagaagaagaagaagaagatgatgatgatgatgagtagaagaaagaaaaaaagaaaatttggtccctgcttacctgaaaatatgtttgttttaccctcagacttgaatacagtttggtgcagtataaaaagaattttaatggagtttgtattgaagtataacatatatgcaaaatacataaatcataaataagcacctcagtgacttatcacacctatatgactaccaccctggtaaagcaatagaacatttttatcatcccccaaacaccccttccaatcactaccctcaccctcctacttactacctgaactagtctcatagattagttttacctgcttttgaactttatgtaaatagaatatttcaatatgtactttggagatcttttttcttctctgtggaagcttttaatgtagttagtgtcatacagatcttcttctccttattgatttttagtccacttgtattatcatttactgagaaaaatgttaaggtctcaggcaatgaatgtagagttccacctttatttctcacagtttttgttttgcatatcttaaagctctgttattaggtgctgttaattatttgttatatctttttgctgtattgacatttttattaaagtgttcctctttgtctctagtaattctctttgatttgaagtaactttgtataattttaatgtactcattacagctttcttatgcttactcttagcatgatatatcttttttaacccttttatttttccatgtgtctttatattcaaagtacatctcttgaaacagcatatacttggtttttacttctctatccattctgataatctctgcttttatttggaatgtttaatccatttacatttaatataatctttcatatgtttgtattaaatctttatacaaactccatcaaactccatcaatgcaatattataatttttgctttaaagagtcataaacattttcaagaaattaagagaagaaaaaatttaaaatgtcttgtgtgcttacttatatatttgactatttctgatggtcttcattctttcttatatatctaagttgtcatctgttacctttcccctctctaaagaactttgcttagctttttttgtttgtttgtttgtttgtttgtttgtttaagagacagggtttcactctgttgcccaggatggagtcaagtgtccattcacccgcatgatcatagcacactgcagcctaaacacctggtctcaagtgttcctcctgcctcagcctcctgagtagctgggactagaggtgcatgccattttgcctggttcatttaacatctttttaaaagtataagcctctactgaataattatctcagtttttatttatctggaaacatttttttagcctttatttttgaagaaagtttcactggttacagaattcttgcccgattattttctatttattcattagtttgaatacatcattccagactttctaatgagaagtcattctgtattcttatgattttcttctttataatatgtcatttttctgtttatatttcaatattttttctttgcttttgtctttcatcagtttgactgtgatttgtctttctctttgtgtttatcctttcttagcatttgttaaactttttgaatctataagctgatattttccaccaaattgagaagtttttcagcccttgttccttaagaattttcacctttgctcacttctgttcccctgagatttgaattatctgtgtttagtaatttgagattttcctacagatctttaggctgttcatttttcttcaatttttaaaatctttttaaaattatgtaatctctattaaatctaccttccagtttacagatttttcaccatctccaatctgtcattgagtccacctagtaaatttattttagttattgtacttcttacctatagaagaatatataattgctataaggtatataattataatattacatatatagtttctagttctctgttcagattacctatctgttcacttattgatgtgatagtttcctttaatattttgaatgtattttaaaatagctgctttaaagtttttgtctgctaatccagtacctgggtctacttggaatcagttgcttctgactctgccttttttttgagtcatattttcctatttctttgcatgtttgataattttttgttgttgaaaactcagtattatatagaatatactatagcaactctgttctctgaggattgttggcatggactcaaactgcaaattttgcctccccatagtatgcatcatctgttattctcatgacttcccactgctgcttttttagcctggccttgggttcttctgtgtgcttgcattatgtagcagtcaaccaagggtttatgcagagatgaagctcatcctttccatgatttcctttcttttagtgacttctccctattttccaaatattctgttaacctcaagctctgacacttgaagcctgtgaggttcagcttcctgccatccaagctgagctcagttggggaatgtatttacttaaaaaggcaagcaaacaaaaaagcaacaaacaaaaaacctctcagattgaccccatgtagctgtctttagcagtagaatccttaaaaaaaatcaattaaaaaaaaaacacagtagaatcctccctggtctctgcctgcttgttcttcctcttggtattccccccatacatatataatttagctacccagcagagacttgggcagtgtttataaccagaatttacatcttattcttgtggttctcttgccactaggatattccccctttaaattccagctgattttctagccctcaactctgatctctagcattgttagctagggatacatgtataatttagctacccaacagagatttgtgcagtgtttataaccagaatttacatcttattcttgtggttctcttgccactaggatattccccctttaaattccagctgattttctagccctcaactctgatctctagcattgttagctggtaacgctatggtttttctgccacctttttctacagccaccatagctgtgggagttggaggctcccacatgtgagaaagccacatgctaacaattctcaaccctttccagttgcactcttagaagagcaaactcttcctgatttctatctacttttagaggtttttggtgtcattaagattttgttattgttgttaattcatccagtttttctaattgttatttgtgagaaaatgtgtgtgaaccagttcagtgctccagccttacaagatgtactctctgcttatacttttgagcccagtttttctctacagctcttatctggctgatttctatttatccataatgtttctgacctatgtgatgatactctttcctgctttcctgtattgttaagggcaaaattatgtacatctatagctacatctatatctataaatatcttcatttcatgggattttaggtgggagagagggagcacatgggcttggtacctcatcatgatccaatcaattgggttctttctggaacttaacctctcagaccctaaactaagaacaatctaccacttgaatggttcagttttgaactaggcttgactgccaaggaagtggataggccatcaagtgtagagagtttggaagaaagttcttcttttttgagatggagttttgttcttgttgcccaggctggagtgtaatggcatgatctcagctcactgcaacctccgcctcctgggttcaagtgattctccttcctcagcctcccaagtagctgggactacaggcgcacaccaccacacccaactaatttttgtatttttagtagatacagcgttttgccatgttggccaggctggtctcaaactcctgacctcaggtgatccactcaccttggcctcccaaagcactgggattacaggcatgagccactgctcctgacctggaaagttcttcgggggcattgatttcatgatatttgattttcatgagtggtccatgagtacacctctttaagagcttacttccctcagaggaggagctcattcaccaaaggcattatctaatataaatatctctaattttaaataaatattaacattctagtgttgacttgatttacattaatcaagactgtctggcaagaagccccatcacatctgttgtctcattccagcacttactctttctaactaagtagtccatcattataactgtaacactaagccccaagcattaaatgtgtggaagggatccacttattttttgttttaattctaaagtgagtaggtcttaagagaaaaggactcttttttgaaatgtgttcatgaaaaaatgtagacattgcttgagatgtactgaaatctaaaaattagctttaatctccacagagacaagctagaaatttatacttatgaaccaaatggtctttattgtaccccaatattacttcttcttattatttgaattggaataatctgtaatcttttgacacattggtaatttacattgtatttagaggttgcctttttttttttttttgagcttgacagacaaaagaagggttttgggttatctgcaaacttgaattctggcaccattgtcttttcctttttgaaaattttaataagattgtctgcttggctgggcacagtggctcacacctgtaatcccagcactttgggaggccg[135 bp omitted]gaggcaggagaatggcttgaacacaggaggtggagtaagccaagatcggaccattgcactccagcccaggcaacagagtgagactccatctcaaaaataaataaataaatgaataaataaataaatattgtctacttcacaggaaagggtttgtttattctctcttaatacaagcaatccaaggctgtatttatctcaagaaatgttataggtgtcgacttatcttcaaactcaggtaatatacattaaatatgttcagctttttgtttgtcaatcatacctcaataaagtggtttttattttatttcattttatttttagaggcaaattctcttgtctcactctgtcatccaggctggagtgcagtggcacgatcatagctcaatgcagtctccaacccctaggctcaagagatcttccttcctcagcctcctaagaagccaggaccacaggcatgcatcactacacccagctaatttttatatatttttattttttggggaggcagggtctcactatgttgcccaggctggtcttgaactcctggcctcaagtcatgggatcctcctttcttggcctcccaaagtgctgggattacaggtgtcagccaccatatcaggcctcaataaagtagttttatagaaaagacaaatgttactatcctccagtctaccaagactttgtgagaattttaaattggcttattctttttgagcaactttgtcccaacccttcctaaagagaaaggactacaaaagatggtccacagatgattagagggcattaaataccgtttacacaagatgtttcaaatggtctgtaagacaatcatcaaggcttcagataataaaaggcatccttccctatattctttttttttttttttgagatggagcctagctctgtcacccaggctggagtgcagtggccccatcttggctcattgcaacctttgccttccaggttcaagcgattctcctgcctcagcctcctgagtagctgggattacaggcatgcaccaccatacccggctaatttttgtatttttagtagaaacggggtttcaccatgttggtcaggctggtctcaaactcctgacctcgtgatccacccccctggcctcccaaagtgctgggattacaggtttgagccaccgcgcccagccttttcctatatttttgtgaaacacattttggtgtcaaatatgcatctgggaaactgcatcttttatggttgcatctcttgatggcttccttgcagtggcactgctgagctatttgcaacctgtgccaagaaggatatcagggtgtggcacacatcatccaacagggagctgctgcggatcaccgtgcccaacatgacctgccacggcatcgacttcatgagggacggcaaaagcatcatttcaggtaacgtccacatgtcaagatctggcttggggctctagctgcggttttgattcttgtcactctcctcccatactagtctctacatgtggataacctagaacagcctcccactgtccacccccttcttgcttctaatctagcctctctttggagtttccttccagctgggagactttctgagctaggaaggaccaaatagcaatttctcctctcccacattgctgcatatagcgtgaatctttctctctagtaggaaaatttagaagttcaattttgaaaaggagtttgaaaaggacaggtcccccatgtgaggaccctttttgttgtgtaagagataaaaccctgactcaaacgaagtgatgtctcaaagggaatttatttttaactcaatttattattttatgccatttagcataaattataggcagcgtgatattccacctctaaagacttcagcatgtatctctaaaaatgttttcctttaaaacagtaatttctcagtattgtcttatgctaaatctatctgtaagtctccccagtgctcagaaagtacacatactgcttcacatcaatgaaaagttcagtggatctttagggacagctattaaaatggtgacaccaggaaaccatctcgcccctcttttctttctttccctttctttctttctttctttcttttcttttctttctttctttcttctttcttttttcttccttgcttgcttgctttttttttttttttctcagatggagtttcactcttgttgcccaagctggagtgcaatggcgcgatctaggctcactgcaacctctgcctcccgtgttcaagcaattctcctgtctcagcctccagagtagctgggattacaggcacgctcctgcctcagcctcccaagtatctgggactacaggcgtgtgtcatcacgatgggctaattttttgtatttttagtaaaaacgggttttcaccatgttggccaagctggtcttgaactcccgacctcaggcaatccacccgcctcggcctcccaaagtgatgggattacaggagtgagccactgcacccggtcctcactcctcttttcttggccctgtcttctcctccttgttagcgtccctaccccaccctgcgcatgtcttctccacatagggctgccaggagctctgggcttaccttacatctagagcgaacacggctcaggacagaaatcttggagtcctcactgcctcccctttttctcttatgcccacatccacatcccctgctgatgctcatttcaaagtacatccaaggtccctcacccctcattatcttcccccttatcctagccaccagcatctctcccctagattgccctcgtaccttcctaccacgtctccttgcttctcttctcacccagtatactttcccgcagtctgttttcgacacagaagc[134 bp omitted]tacaagcatgcgccaccatgcccagctaatttttgtaatttttttttttttttttttaagagacggagtctttttctgtctcccaggctggagtgcggtggcgcgatctcggctcactgcaagctccgcctcccgggttcacgccattctcctgcctcagcctcccgagtagctgggactacaggcgcccgctaccacgcccggctaatttttctgtatgtttagtagagacggggtttcaccgtg[134 bp omitted]tgaggtcaggagtttgagaacagcctgaccaatatggtgaaaccccatctctactaaaaatacaaaaattagccgggcgtggtggcgggagcctgtagtcccagctacccgggaggctgagacaggagagtttcttgaacccgggaggtggaggttgcagtgagccaagatcgcaccactgcactccagcctgggtaacagagccagactccatctcaaaaaaaagaaagaaagaaagaaagaaagaaagaaagaaagaaagagagagagagagagagagagagagaaagaaagaaagaaagaaagaaagaaagagaaagaaagaaagagaaagaaagaacataagtcagaatttgccatatttagggctcaaaagtcttttaccctctaagagtaaatgacaaagatccccccatcacctacaaggctccatgtgaatttctgtcctcctttaccttcttacctggagctcttcctcttactactcaccccttctagccatactttcttcttgctgttcctcaaacacactgggcatagatagagcctttgctctgactcttatgtctgcctgaaatattctttccctagatacctccatggctcactccctcaccccctcacctcctcaaatctttgctgaaatgggatctacctttagcattctattttaaactgctaaggtcaagaggtgacattaaagcttatgagagggtgccagccatttgaagacctggggagaaaacattccaggcagagggaatagcaagtgcaaaggccctcaggagggagatcgcttggtggatttgaggaatagcaagagggccagtgtgtctggggcttagtgggtagttgggctaggggtgcagggacagccagtaaaagaagttaaaagagatggcgggggttgggggtcgggcacaaatactagttaccgtggaggataaaggagtttggattggattttaattctaagtgcagtgggaaaatgttttggaaagtttttttttttttttgagatggagtcgtgctctgttgcccaggctgggagtgcagtgctgtgatctcggttcactgcaacctccgcctcccgggttcaagcgattctcctgcctcagcctcctgagtagctgggattacaggcatgctgccaccatgcccagctaatttttgtaattttttttagtagaggtggggtcttgccatgttgaccaggctggtctccacctcctgtcctcaagtgatccgcctgccttggcctcccaaagcgctgggattacaggtatgagccactgcgcccagcctccacttttttttttctttttttgagacagggtcttgctctgttgcccaggctgaagtgcagtggcggactcttggctcactgcaacctccatctcccaggtttaagtgatcctcctacttcagcctcccgagtagctaggactaaatgggcatgccaccatgcgaggcaagtttttttttgtttttttttttcatattttttgtagagactgggtcttgccatgtttccaggctggtcttgtgctcctagactcaagcaatccacccaccttggcctcccaaagtgcaaagtgttgagattatagatataagcctttttttttaaataaaaaaggaagttcttgatcaagaagatgacataatttttaaaaggccacactgatccctgcataaataagtggttgtaagcaagagtggaagcaagcataagctgttatcacaatccaggagaaagatggtggtgccttggatgaaggaggtaccagtggaactgttgagaggtgctcagatttgaatgttttttaacagtaaagctggtggaaattgttgatggattggatgttggattgggttgggtagatggaattgagggtaatcaaggaagactcaggctgttggcttaggcaactggatgggtggtggcaacctgtagaagggaaaggggcctatggtgaccagcattcagctgagctggtctctttcctccagcacagcaccactcaccaggcctgcctctccttagtgaggccagcagactgtggagagagggtgcatatactgatcctgcctgccttttgtttccctttcatgccagcatggaacgacggtaaaatccgagccttcgccccagagacaggccgactgatgtatgtcattaacaatgctcacaggatcggcgtcaccgccatcgccaccaccagtgactgtaaaagggtcatcagtggcggtggggaaggggaggtattgaaagcagaaatttgaaaaaataacgctctgtttagaacaactgccctataggaagccatctatttgcttttaaaaatacacacctttgctagtattcaagcaggaccaaattgacattttgatgagatctgaaaatatgtcataaataaaagttctaatattataaatgtatacttattttgaaatggagtctcactctgtcacccagtctggagagtgcagtggctcaatcttggctcgttacaacctctgccttctgggttcaagcgattctcctgcctcagcctcctgagcagctgggattacaggcgcacaccgtcatgcccagctaatttttctatttttagtagagatggggtttcaccatgttggccaggctggtctcaaactcctgacctcagatgatccacctgccttggcctcccaaagtgctgggattacaggtatgagcaaccatgcctggcctataaatatatatctaagtacatttgtacacagaaaggacgtttacaatacagacatgaaagtgttctatgtggactagagttaaggaattcatgcgggtgttttgccagtgttttggcttgcttgctcttttcctccgaggatcgtggttgtacgaattgtcatcttatcttttttttttttttttagacggacagagtctccctctgtcacccaggctggactgcagtggcacaatcttggctcactgcaagctccgcctcctgggttcacgccattcgcctgcctcagcctcctgagtagctgggactacaggtgcctgccaccacgc[187 bp omitted]ttaaatacacccagacgttttgaccattatttttaaatgatcatgctcaactttttcttcccattattttgaggaggctgtaacaccttttgctcacacatttttctctggttctctcctcctctgtgccccagattctttgctatcccaaagccttccctttctctttgagatattttcttttcctttccttaatcccctgtcataggaagaacagaatagtttgtgctcatcttatttttcataaatccaacataggcactataagaaggcgtaagcatctgactactatgttttctggtgtagttgtgacagatcctttgtccattaaaggaatactggctgggcctggtggctcacgcctgtaatctcagcactttgggaggctgaggcaggtggatcacctgagctcaggagtttgagaccagcctggccaacatggccaaaccctgtctctactaaaaatacaaaaattaggccaggcgtggtgagttggaggttgcagtgagccgagaccacgccattgcattgcactccagcctgggtgacagagcgacattttgtctcaaaaaaagaaaaaaaaatacaaaaattagccaggtgtggtggtgcactcctgtagtcccagctacttgggaggctgagacaggagaattgcttgaatccatgaggcagaggtcgcagtgagccgagatcgcgccattgcactccagcctgggagacggaccaagactccatctcaaaaaatgaaggaataccatactaactaaacaacttcccttttatctatcctttttattaaagcatcatattaatgattttaaattttgtgtgtaggtagttgtattacctatgaatttcactccaggataatacacaggtatttggaaatatttgtgatataaaataggtattggattcagtagagttgggaaccattgcttttaaatgatcaaaattgaacagctgattgtgaaagtttaaatatagctctgggtactcacgaactttcctgacagtaccagaaatttgagagcagtgatcagcaaaagtgaatagacattatttcacttggttttgcgttggcccttgcattatcgatttgcatagcaggtgtctgattaaatttctcagcctgtatgtacaagcaggtacaggattgttagtagcatttttgaagctctgttgaagatgatcacatcttatacatgaatatgcctgcccttcaacttagcattcacaccccacccaaccgagacaaagacagggaattaaaaaaacacaaatcaagcatagcaaaggggaaaaagctcttggaatcttttcctatcccttcagaagtcccaagtgtggatcaagatcctgtgctctgtggctttcaggtgagggtatggcagataggctgtcagacccagaagctggaggaggccctgaaggaacacaagtcatcagtgtcctgcattagggtgaagaggaacaacgaggagtgtgtcaccgccagcaccgatgggacttgtatcatttgggaccttgtgtaggtacctgtgatggggaggatgcagtgatacctgcaaaatccaatcatgccaacagtttattgaacatgagagaagattcacatggagggtagaaatcttatttaaggcaacacagtaaagggatgttcatcagaagccgttcatgacggtccatggtttatcgatgctagtggggagggttacaatttccaggaagaactgaatgttagaagtttctgggcagatagggaaatagctttctgtgtccacacagtgaagcatggtttaacttacacgaattcaaccctaagtgtcccaaatgaaagggggcaagaaaaataacgaatgcaaggtcgggcgtggtggcttctgcctgtaatcccagcactttgggaggctgaggtgggcagatcacctgaggtcaggagttcgagaccagcctggccaacatggtgaaaccccttctctactaaaaataaaaaaagttagctgggcgtggcggcaggtgcctgtaatcccagctacttgggaggctgaggcaggagagtcgcttgaacccaggatgcggaggttgcagtgaactgagatcatgccactgcactctggcctgggcaacaagagtgaaactctgtctcaaaaaaaagaaagaaagaaagaaagaaagaaagaaagaaagaaagaaagaaagaaagaaagaaagaaagaaagaaagagaaagaaaaataactaatgcaggcagtgcctcttatcattccagttagtcaggtgaagcccagaatgaacttcccatggaggggagggatgctggtgggacatacatttgcctttcccctcggttggctgcattcccggggacctcttatgctccgagcgtatcacacccccatagaatgactaacttcaaactaactagaccaaagcctgtgaactttattgtaggagtaactcaaaggatttttgaacagtggctttttgaatttttgactataagcatttttgctgtgtttttattttagaatcggatgccattcctccacccctctccccacccacctatcacccctctacccctcctacgaggcactgcctctatatcactgcatacgagagacgaggataagtgcaaagatgggaggaaggaggcacgcacgacaaagaacatgagatacgcttgatgggaatgagaactcaatgtgtacttaatacattaaaaaacacaaagcactgctgggcgcggtggctcccgcctgtaaccccagcactttgggaggccgaggtgggaggatcaagaggtcaggagtttgagcccagcctgaccaacatggtgaaagcccgtctctactaaaaatacaaaaagtagctgggcgtggtggcgcgtgcctgttatcccagctactcaggaggctgaggcaggagaatcgcttgaacccgggaggcggaggttgcagtgagctgagatcgcaccactgcactccagcctgggccacagagtgagacttcgtatcaaaaaagcaaacaaacaaacaaaaaagcaaaaaaaaacccgacaaagcaagcttttgtcttctagccctgtgtgtctcctggggatcttgttacaaatgtcgattttgattcattaaatttagcatggtacctgagattctgcatttctaagaagctgccaactgagagtgctggttcaaggaccacacttgtaggaagtgttaggctatacctgaccttcctcctgggaaaatatagaactagaaggacatgtctgaacttatttctatggatgctttgtgactgcctcaaatccttaaagctgttccgttgtgtagcaggaattcttgtgccaaaatctttaaaaatgctcagctcagataccacgtttgaaaacttccataatgagaagaaactgtgcagaaggtgcattttttagccaggaaagcctggcctgtgagatggccacccaccacattgtctgtggaaggagaagcgatatttacatatttcttggtacagtatctaaggcaggggttctattatgcacataaaaatcaactgaaatgctggtttaaaatgcagatcctggccaggcgtgctgcagtggcatgatcttggctcactgcagcctctgcctcccgggttcaagtgcttctcttgcctcaacctcccaaatagctgggattacaggcatgcgccaccacgcctggctaatttctgtatttttagtagagacggggtttcaccatgttggccaggctggtctcaatctcctgacctcaggtgatctgcccaccttggcctcccacaagtgctgggattgtaggcgtgagctgctgcactcggcccataatacccattttaaaaatacccttcccaggccgggctctcttcagttgcgggaggccagctccctcttgggggcaccctgggcagggtagggggtgggtcttgggagggacttcttaccatatgcagacaagggttgagcctgccagcttttgggacatccccacgtgacaggctcgtgctttccgagggttgtgcatgatatggtacgtccaaacctgtgtacaaatgtgtacatgacatcttgctacagcttttatttgtgaattaaagatacatcgatgattaaaacataaacaaaataaaatacccttccccacattctgcttctcagactgtagggagctccacttccaaatggtggcctcaggactcaagtacattgtgtgggaggcagcaggttggctgtgagttcagcctcttctgcttcttcttccctggaacttaagggttctcattgagtttcgtgctctgtctttaggaaagggcccttcccattgtcctctggtggtcactgataggccaaccggagtacacagaagtagagaggacagggtgacctgaagtctgttttgaagaaatacaagcaccactttgctgagcagtatgagatgtttggcatggagataaaccaacccaaatcccagcttgcaccaaatccagcttgaatagtgaataaatttcctagggaagagaaagtcgactttcacagcttttgaatctactttccaggcgtctcaggaggaatcagatgatactagccaacaccttattccagtgtgtgtgctatcaccctgaggagttccagatcatcaccagcggaacagacagaaaggtgagtcctcccagtgagagatgagatctttccagcgcaagagaaaagcagtgaggcgttgtggtggagggtgcgggctctggagtcaaaccaccttgtttccaatggtggtctgtcatcaatcagccatgccactttggaaaggccatatcaccttccagtgtcttcacttccccacctgttaagtggaaatggtaccactgacctcatagagtaaggattaaagtcatgcttgctcatggtgcttatagcagggggtctggcacatagtaggtactcaatagattggtttttattattagggaatttctgagactggagtagaattgctgtgcccaaaccggttatcactttgactaaattcagacagaaaggcaatagagctcctcatctctcagcactgtacttcatcaatacattaaaaatctacacacggagccaagcgtggtggctgatgcctgtaattccagcactttgtgaggctgaggcgggtggatcacctgaggtcaggagttcgagaccagcctagccaacatggtgaaaccccatctctacaaaaaatacaaaaaattagtagggtgtggtagcgggtgcctgtaatctcagctactcaagaggctgaggcatgagaattgcttgaacctgggaagtggaggttgcggcgagccaagattgcaccactgcactccagtctgggtgacagagcaagactctctcttaaaaaaaaaaaaaaattctacatatggtacagatttcccagctaaagaggaaggtgaaggttcatccttctgtttgggggaatgttcacccttggagcaagcaaggggtccctgctctcatgaaccttacttccctaatttattttgggtaggaggggatggaattggctaatacacacatgaaccaatccatgaatggacaatgaataacaagtgaacaagagatgagatggtgaaaggactgagaaaggagatagaactggtgacatgatactggcgggcgggggaaagctccttcagctggggtggtgggtgaaggcctccttaaggagcagcatctgagtgaggcctgaatgacagaaggactcagtcaatgcctagacctcaaggaagggcatctctggcagaggacactccagtaagatggagccctactggggctgcccaggagagtgtcaatttggcttctttggctgggaaggcaggcagtcaagttccaactacttctgtgggtgtgaatcctgagaaacatgggttctggcatggttttctatctctttaggcgtttactatgaaatcagaacttttttgttaacatgatcaagcatcaacagacattacaaagcaaaagaaaaaaattaacaagaaatagtatgcataatgtctagctagattcagaggaatacagactcctggcagagtgactggaacacagcacgtttccgacatgaaacaatgagaaacaaatgaaatgcacgtgcaggtttgcactcctgattcctggtcaagcactctttttttttttttttttttcaactttaagttcaggggtacatgtgcaggatgtgcaggtttgttccataggtaaacatgtgccgtggtggtttgctgtacggatcatcccatcacctcggtattaagccctgcatgcattagctattcttcctgatgctcttcctccccccacccaccaccccccgacaggtgccccagagtgtgttgtttccccacgtgtccatctcttttcatccttcagcttccacttgtaagtgagaacatgtggtgtttggttttctgttcctgcgttagtttgctgaggataatggctcccaactccatccatgtcccggcaaaggacatgatcttgttccttttcatggctgcatagtattccgtggtatatatctgccacattttcttaagtttattctgttttttttggagacagagtctcactttgtcacccaggctggagtgcagtggcataatctcagctcactgcaacctcctacaactttcacctcctgggtacaagtgattctcatgcctcaccctcccaagtagctggcactacaggtgtgtgccaccacatccagctaatttttgtatttttagtacagacagggtttcaccatattgcccaggctggtctcgcattcctgacctcaagcaacgggcccaactcggcttcccaaagtgctgggattataggtgtgagccgctgcacccagctggccgtatcgcattttctttatgcagtctatcattgatgggcatttaggttgattccctgtctttgctatcataaacagaagcattctttcctaagaaggaaatttaaatcttgaatagattgtgcattcacaaagtttaaggtacaaaggcagtatattcaggaaaaaaatcaccctcctttaggcacctgtctctccatccctaaggtagttctgctccccaacagggaaccaaggttaccagttcctctttaaactctaccctgtggaatatttcagtgctttggagcagaagggaaagttgggaataagggtggtgtgaggaagagggagggcgcagtcccagtgggagggtgcctgtacagcccagtctctagaactctggggagtggggagtgctcatcccccagtgagaaggaagaaaatgcttttcctccctccaggcctgaagcttagctgtggatgcagaggctgttctttcttttacagcttgcttcaggctgaatcttcttagtcttatcaaaagccctttctgtcttaatccaggtttatcagcacatcaacatgtctttaaatagaatgcaaatttaaaaccaatactaaaaatattaaaatggttttgccaccccctgctgtagcctatttataatttcagccagtatcatcccgtggtgtatttttgctcccttctatataaagtagagccatcttttgttagcatgtgcatggatgactctcctgagctgagtcctgcttaatgcttctttcctgaattccagattgcttactgggaagtatttgatgggacagtaatcagagaattggaaggttccctgtctgggtcgataaatggcatggatatcacacaggaaggggtgcactttgtcacaggttagtcctgggataggaaaaagccaagcctggcttatttagacgaggacatggaaggaactcccaggctagaggcaattggaaaagacaacaaaagggtctcaaggcaacttggttagaatcagattccaaccaatactgcagccaatgtggctgagaaagaaaaatccagaagtcacatttcaatgagaggaaacatttgcacaagagccttaagagcacaaataaaagccaagacttagattgctaggcttgctatttttggtgggcattgataatagaaatggggcctttaaatggcctgggctgtccagcatacttctaaagtcttaaaagccagtcttttaattccactttattattgcatgatgcgatgcccttcccaccaaaacaaatgaattaaccaatatttcaaaggggcatttaccacacaacatgccgattggaacatcattatcatttcctgccaagctctttgattcatcaggatattaacaaataaatgcggccaggcgtggtggctcatgcctgtaatcctagcactttgggaggccaaggcaggtggatcacctggggtcaggagtttgagaccagcctggccaacatggtgaaaccctgtgtctactaaaaacacaaaaattagccgggcgtggtggtgcacgcctataatcccagctacttgggaggctgagacaggagaattgcttgagcctgggaggcggaggctgcagtgagctgagatcatgccactccactccagcctgagtgacagacagtccgtctcaataaataaataagtaaaaaataaataaatgcatgaaatgaattaagtttcacaagtacattgactacaaagcaggtatcaaactagacacagtgtgatcccaatcatatatatgatgtatatgtataccagtatacttatagagaaaagactggaaggaactaagccaagatattactagtggttatttctgggtagtgggatgaaatgtgattttacctctttgtatttccccctcctcttcaaatttactgcaacagatagatttttataatcaagtaaaagtgttattataaagacagatacatggggaccatgttgaaaatgatccagttatttgaaatcagggctgtttctctctctcctattgcagcaatgccatatacgtgtttatctttttcaggtggaaatgaccatctggtcaaagtttgggattataatgagggtgaagtgactcacgttggggtgggacacagtggcaacatcacacgcatccgcataagtccaggaaatcaatatattgttagtgtaagtgccgatggagccattttgcgatggaagtacccatatacctcctgaagctgatgagatgtctctgagccttggcgttgcacgcagtcctgttgaagactgagtttagataactccaacactagtcttcatttctcacagctctgtttttgttcttgagtcaatttttctctttttctttatagaatgcattttatattcttaaattgcatattaaaattgaagtatgttcaagaataatttgtgcagactctaattagaacttttaacattttgaataaattcttagttgttggttttctgttataatttgttttctgcaactctgcaaaacccacagaccttcctcatgatctgtgcacagacagcattgctattatcctctaaaaataaggtgaggtgaatttccttcttaattgccatttcattggtcaagctatatgggactagactcagatttaaatccagatcttgggcaggcttcttaaaaattctctgagccacaattttctcttttgtcaagcaagagtaagttcctgctcaaaaggttattgtgagaattaagtgactaatgtactaaagcatcggcagaattcctgacagggtagagagaaatatgcatgctttctcaaagaaaatgtgtggtgttggggatctcaggacaattaccaaagaaagatgaaattacagagatgctttattggagttggccattacatctttcttctgtgctttccaccagaagggtgatgaaatggaccttgtgtccttgtgtattaatcacccagccgggtatctttttccagagaggggtaaataatggcattttccagaacgcaagtctccgattcacagtaccgtctgatgttttaagcatgttatttatcctttaagtaaggctgcttttttgcatgaggtaactgctgtaacccggtttgaaagatcaagttttttgtttgtttgtttgttttttgagacggaatttagctcttgtcgcaatttagctcttgtcgcccggctggagtgcaatggcgcgatctcggctcactgaatcaagcgattctcctgcctcagcctcctgagtagctaggattacaggcatgcgccaccacgcctggctaattttgtatttttagtcgagacggggtttcaccatgttggccaggctggtcttgaactcctgacctcaggtgatccgcccgtctcggcctcccaaggtgctgggattacaggcgtgagccaccgcgcccggccaggatcaagaatatttaataaatgatgatcacttattaaacaacaagtaacatttcagagcgttagaatactgcatctcacatggtgctgatctcttcctgagctagaaattgacgagaaagtcattttgcaagaccttgcctgattaattataaacctgacagttgcatgggataaagtgaggggtgggggaggggcccagggttacccagggaatcaagggcggggcaaggccaaactaattctgattgggcaatcattcaacaaggatcgtgcgttaaggagtgaaccagaaaccgcgtagggggcgcgcctgagagcctgaaaacttcctggttagcaaatactgaggctggaaagggcctgaacttggcagtccatagatccaggtcgagttccggtttccctgcttacggatcgggcggcctccctacgttgcgataacctctctgagcccccttccttgccgattaaagcaagggtgatcaagtcttgcaagtttttggaaaatgattctaacccaatctgtggtgtaaaaaagcaaaccacaaccactcgggggcttttttcacagggcaacacgtggctcccagttcaggtcccgggttggcgggtgcaggcacagactctgcctccccccaaggggcagacggtctggaaggaggtggcgacacctgtccgcacacacctgagcctgcggaggaaccagcggtgcacaaaagcgctccccacccccacacagcgcccagcgcgcgcctctcaccacgcccgaggctgtgctctggagatgcctgccttgcccttttcttcctgcagtagccaggcctttaccatttactaggcgctttcagaatgttcatttctccgtaatttccactgcttgaaggctgctcgaggaacaggagcagcggcgaaacccaggtctgtcggtttacgaggtaaggaagggtggggaatccgaccacgaagactcccagtcagcgcagcgggggcggcaccaggcaggggtaggggtggcccggcgctgccctggagggggctggtcgtgccgccggattcccgcgcggggcggggctgccccgcccttggctccgcctccgccccgtccccgcacacctggcccgcaggtagccggcaccaggagccttagagaagctgtagggcctgctggccgctcgtccgcctcgcgcccgggggctccgcgcctggagctgcgccggcggcagccatggacctgggccccggggacgcggcaggagggggaccgctcgcgccccggccccgccgccgccgctccctgcgccgcctgttcagccgcttcctgctggcgctgggcagccgctcacgccccggggactcaccgccccggccccagccgggacactgtgatggcgacggtgaggggggcttcgcctgcgccccgggcccagttccagcggcccccgggagccccggggaggaacgcccgcccggaccccagccccagctccagctccccgccggcgatggggcgcggccgccgggcgctcagggcttgaagaaccacggcaacacctgtttcatgaacgcggtggtgcagtgtctcagcaacaccgacctgctggccgagttcctggcgctggggcgctaccgggcggctccgggccgcgccgaggtcaccgagcagctggcggcgctggtgcgcgcgctctggactcgcgaatacacgccccaactttccgcggagttcaaggtaggcagcgctgcgccgccgaccgccctgtccccctggtttcgcctcttgaaaagtgtgtgcacgatcaggaaagggttttcttggggccttctttaaatgccgttgaccagttcagccccggattaccggctttgttttgagtcgatgtgttacgctgtcgcttgcttatgttttctttgtaaattaattctcctaggtattttgagagggagtggggtgagctggcagattgaagggtaatcagcgtttttggattcaacaagcatttgttgaagtattgaaggcttgtgggccagacagtgttctaatgccagctctagagcttccagtctggaatgatgtggggtagggaatgggatgttgaaggccaaggcctcagaggaaggaggtgatgcttgcgttgagatctgaatgatgagaaggatgcagtcagggcaagctgtaggactaatccaggcaggaggaacagcaagtacaattgccatagacccgaaggagctgagtgctggagacagggaaagaaaagcagtggcgttggagcttaggaggcagatgagtttcgccagatcacgtaagacctaggaggcaacggtaaagagtttggattttattctaagcccagtggaatctgacaacctacaggccaggtaccgtgctgagtgcccagcaaaggcagtgagcgtgctattttggagatagcatccttttgtttaaggcgcattcaatcccctacaatgtatgagcacgggcttgcattttattgtctgcaagatcacggtctacttactcgggttgctgccgggtcgtgaggctttgtaaattgtttgtatcacttcacccgggattaaaacggggtgtttgtttggggtcccagttggattaaagcgttcctgataattgatgcacatggcttgcttcctgcaaaaaaaaaaaaaaaaaaaagaaaaaaaagaaaaaaaaagaagaagaaacccgcagctctgggcagagaactgaagctccctacagactagtgattgttgttcttgggggagggggaaacctgtcagtgttcattccacaagcatcaccgctcttgagtttcagcccgagaaagcagtgtttgccatgtgacccatgagatgccaacccccaccttcctccctcctgcctccattagtgaagcactgttctgcagcagccagtgggtcaaatggttgtcactaaatgtctctttttggtgacatttgctttttaagaaagaggcagtatagtatagtggttaagagcaaggtctctggagttttgtgaccttgagcaagttaccagatctctctgtgccgcaactttcttcatctttaatatagaaccataatggtacttacctcgttatacggttgttgtattaaatgagttctatgtagaacacagtgccagccccacaggaaatgttcattattctatcacgacaccttctcacctgcagaaacctagagcagggagggaggtaatctttatgtacattttctcttgctagatgcatttccatccagttaccacag[168 bp omitted]aaaaaaaaaaaaaaaaaaaaaaattagccggacgtggtggcgggcgcctgtagtcccagctactggggaggctggggcaggagaatggcgtgaacctgggaggcggagcttgcagtgagccgagattgcgccactgcactccagcctgggcaacagagcgagactccgtctcaaaaaagcaaagcaaaacaaaacaaaaaactccgaaattagtaatcaccctcaatgactcaccagaattccctatctctctcccgctgtcaaatccccagggcctgggagctcccagtaagcctcagggaattgaaggataatcaagtttgtaatatgttaatgagggagatacaatctggaatttcctgggatttttgggtagtcagctttggagggaggagtggaggatcccagaatccaggctttaaatattatggattgaaatctaggtgagctcttcttattttacagatggggaaacattcgttcaacaaatatttattgaatgtccagagagtagactaggaatgcatggaatgcatgatgagtgatgagtacaaacccagattctggggctgctctccaggagcttatggtctagaggtagaaatggatgttaatgaaataatcacacaggcacatgattggaacagaaacatgttagaaaggacaaatacaaggtgctatgacagttacagcaggaaaatgtgattggattgggggagatcctgtggggtgggcagggaaagcttccctggagaggtaaccaaccgctgagttgaattttgaaggattaggtgtcaatgaagggcttgggaagatgggagagtgcattccaggacctgggaactggaatgccaaccagggaaggaggtggggccgagagaccttcagttcaataaatgaataaaagcccacttggctggggaggaaaggctggagaattagttgcagacacaccacacaaggttttcttaaggagtcttgtcttttcctttctctttctgtttctctttctctctctcttttccttccttccttcctctttctttctttttctttctctctctctctcccactctttctgtctctctccctctctctctctctctctctccctccctcccttcttttcttccttccttcctttccctctctctctctttaagagagagtgtcactctgtcacccaggctggagtatagtggtgtcatcatagctcactacagttttcaattcctgggctcaagcgatcctcctacctcagccttctgaccaatatggtgaaaccctgtctctactaaaaatacaaaaattagccgggcgtggtggcgtgtgcctgtagtcccagctactcaggaggctgagacaggcgaattgcttgaacctgggaggcggaggttgcagtgagccgagatcgtgccactgtactctggcctgggtgacagagcgagactccctctgaaaaacagaaagaaaagtcctgtccgtggtattacctagaattcttttcttctctttcttttttttaaattttatatttttattttagattcagtgggtacatgtgcaggtttgttataagggtgtattgtgtgttgctgaggtttgagcttctcttggccctgtcacccagatagtgaacatagtgctcaacaggaaggttttcggcccttgtcccctgcctccctccttccttctgcggttctcagtgtctattgttcccttccttatgtccatgtgtacccaagatttagctcccccttataggtgagaatacgcaatatttgattttctgtgcttttctaatgatgtaattaaatgttgcacattgtaaaaaaaaaaaaaaaaaaagttaaaatgtagaaaaaaaaagagatctgtaattttaacccctagagataaccattgtaaatatactgatacgtttcaaggtatatacaaacaattgaaaattttagttttacatcctgcttttctcatttaagcattgttacaagacattttcctagtcttaataatacacaacaatcattaataattaagtctttaacaattaatatattattaaattaaccaattctttatggagatctatggttatattaaaaattttagccatctggaatttatattagcttatgtgcttaagcatcaattttagatctacagtgatatactggagacatggctttttaaaaacaaggatgccttcttcaccactcttacgttttgtaagttctggacaaaacagtaagacataaaatggaaatggagtttccattttccagtattatactgtattgaagtttcttgtatttaaatcattgtcctcagctgtgattattcccataagcttaattcctacaaatggaattacatagtcaaagcaaaagtatgactgttttattatctttctatttttactttttaaataaactttattgaggtctaaactatatacagtgaaatgtacccattataagcataaaatttaggaagttttaacaaatgtgtgaacctgtgtagtcaccatcttacttttaaatattgagtttttgttgttgtggtggtggtggagacagagtctcactctgtcgcccaggctggagtgcaggggcgctatctcggctcactgcaacctccactttctgggttcaggcgattctcctgcctcagcctcccaagtagctgggattacagacatgcaccaccatgcccagctattttttgtatttttagtagacacggggtttcgccatgttggccatgctggtctcaaacgcctgaccccaagtgatccacctgcctcggcctctcattacaggtatgagccaccacgcccggccaacatacctatgtttttgtggtgagaacatttacgatctattcccttggcaattttcaggtatataatgtattaactgtaatcaccaggctgtataataaatcttcatcccttattattaatttattgaacaaaaagaaatagcatatttttaaaaattttaataggtttttggggaaccggcagtatttggttacatggataagttctttagtggtgatttcagagactttggtgcacccgagcaatggacactggacccagcgtgcagtctttcatccttcacccgtctcctacccttcccctcgagtcaccaaagttcattatattgctcttgtgcctttgcatcctaagaaataacatcatcttctaaacttgcaaaaatagttttttatttttatttctttgattaggagcgaggtggacgatttttccatgtttctttactagttgcaagtctcctcttggaatcagctgtttgatgttttttttgtttgttttttttgttttttatttgagacagagtctcactctgtcacccaggctggagtgtggcagtggtgcaatcttggctcactgcaacctctgcctcccgagttcaagcaattctcctgtctcagccttccgagtagctgggactacaggcgcgcgccaccatgcctggctaatttttgtatttgtagtagagacagggtttcaccatgttggccaggcttgtcttgaactcctgacctgtgagccactttacccagcccatctgctcaatgttcttatgcatctatctattctgctttggtctcaatgtttttatgtttctgtaagttccttagttcttgtcatatttgctacaaatattttctcaaaactgtctccttctcccaccccaatattggaagatttcgatttatttatatcagacattatgataaatatttgattttgcgtacctgcttttctatggttatattaaaattttagccatctggaatttatattagcttatgtgcttaagcatcaattttagatctacagtgatatactggagacttggctttttaaaaacaaggatgccttcttcaccactcttgtgttttggaagttctggacaaaatagtaagacataaaatggaaatggagtaaaaaatattagaaagaaaattgctaaaatatgctagaaatccttattttagctttattactgtcattcatgataccagatagaaggtagaaaatcaaaggaataatcatttagaacatataaaattagatttgtattcagaaaacaaccagaaatatgaaataactaggaataattttaataagaaatgttaaaaattatcaatgtttgggaaataaaacatacatacaggtagagttatgccatgttgaaggagagaaataaccaaatctagggctgagcacagtggctcatgcctgtaatcctagcactttgagaggccgagatgggaggaccgcttgaggccaggagttcagcctggtcaacacagcaagcccttagcgcaaaaaaaaaaaaaaaaagaaaagaaaagaaaggaaaaaaaagatgtgagataagtaaccaaatattacagttaattcttcccaagctagttaactgtttgggaactgctttgtgcagttctagttatgtttccatagactttcttttttttttttccttctttttttgagatggagtctcgctctgttgcccaggctggagtgcagtggcaccatctcggctcactgcaagctccgcctcccgggttcaagtgattcttctgtctc[134 bp omitted]ggctccccacaatgctgggattataggtgtgagccaccacccctggcctgtttccatagactttctaggggaatgtcttctgtattcatcaataggttattaaaaaaaaattccaagaaatacctgccaaatactttataactggaaaaagacaaagaacaatgttcactgttaaaaaactttgtcatttacaaatgaaaataaaacaattgctcatgatcccattattctatgataaccatttgctactattttgccatgtattttctgctcttttatttttctatctataaatatatacataaaacaatctcaaatatgtatttttgcattttttcttctatgaccggattattattttctttatcatttgtatttcatcagtcataaattttaaggccatctgagtatgtcataagttttcacccagataactttgatatatacagacatctctggttgtatctctcatttcctaaggcaaaatcaccaaaagtggaattgctgtttatggagagggacatttttaaggccctatcttgtcttgcttcttgaagttgtcacctcctttctgaaaaggttgtcaggtactatagccaggctaagatgaagagtgtcaggcttaaaagatcatcatgattaactggagaggaatggatttcac[143 bp omitted]tttactaaaaattcaaaaattagccaggtgtggtggcaggcccctgtaatcccagctactcagggggctgaggcaggagaatcatttgaacccaggagaccaaggttgcagtgagccaaggtcgtgccattgcactccagctgggcaacaagagcaaaactccatttcaaaaaaagaaaaaaaaaaaaagtaaaggtctagactgtagaagtaggaaagagtgtttggggcagctaggtggattacttacctggagctttgaaacatggaatgatatggtttggggctgaacgacagagggtgcttggactatttggtggtgagcaggagagtaaggaacgatttggagtcagagcatgacaatattcagctgagctataggaaaattggtctggtctaccatgaagtcagtgggttggcaaggggagaacctaggggctgggtccctccttaggtagatattgttgtctgggtcagctgtaggtgaaactcaacagttggaatgagactcttctataggggaagggtagagacatttgggaaccagcatccagaatgcttaacagctgaccgatatgaaggagaacctgaaagatgacacctacattaaaaggatgagctggttttagagattttgagttggaagggccggctgctcacccagaagagaatgttggtacaagaagataggtttgagggttgtttgggggtagggttgccagatgaaaaatatttaccatgcccagctgacttttaattgcagataaaaattgaataactttttagtgtaaatacgtcccaaatattgcatgggacatatttctactaaaaacatattcattgtttatgtgaaattcaaatctatctgagcatcttgtatttttatttactaaatctggtagccctacttgggaatcaacatgcagagaagcctgggggaagaatccaaactaatgtgattgacgtaaagactcagagccacacttggggaagccgaggcgggcgggatcacctgaaatcaggagttcgagatcagcctggacaacatggtgaaacctcatctctactgaaaatacaaacattagctgggtgtggtggcaggtgcctgtaatcccagctacttgggaggctgaggcaggagaatcacttgaacccataggtggagattgcagtgagctgagatcatgccattgcactctagcctgggcaacaagagtgaaacactgtcttaaaaaaaaaaaaaaaaagactcagaaccagcatttcagttaattaaatcttgcatttttgctttgtctcatcctaaaatctcctttatttttagttttatttttttgagacagagtctcactgtgtcacccaggctggagtacagtggtgcaatctctcctcactgcaacctctacctcccgggttcaagcgattctcctgcctcagtctcccaagtagctggggtttcagatgtgcaccaccacgcccagctaatttttgtatttgtagtataggcagggtttcactatattggcttggctggtgtcgaactcctgacttaaagtgatccatccgcctcggcctcccaaattgttgggattacaggcatgagccactgcacctggcctctaaagtctcctttaaatctcaagggaaaattaaaagaaagaaaggaaaaaaaaaaaaaaaaaaaaaaaaaagcccagactgcctgatttgattggcagtggtaaggattgtcctggtcctcagtcttattaaaaccagtccctttggcaggcatgaacagagaacagacctgtgtgggacgagactggagacttggctctgcagtctaagagtgggtcccacggccatcacgtgctgtgtgcatgtgcatgtgtggacacacagacaagtgatttgcttacacccagatgcccacatgctcacacatgtatagcaaaagtccctggagagatgctgaaggaactgctaaaagtggctgtcccctgagaaggggtaccacgggatgaaggccaggtagaaggaagacttcattatcatccttttcttattgaattattgttttttagtatgtgcatatattactctttgcaataaacttttagaaagttggaatgtacatttatgcagaaaatgacaaaggtgctacacaatttaacagaaggacagcgcaagggataccaggaatgcaaacaccacgagggcagtgagatgaagaacctgttgaagaaacagatgttcatctttaacagtgcaaacagatgatgatctgttttgttcactgttgtatccccggtccctagaatagtgcctggcgtgtggttggcactcaatgcatatttatcaaaggaatgaagggctggctcagccatttgatgccctaaccacagaaacaagtttgtatccttaaatttcatacatattagaaagaggcagtagaggagctacatgcatggtgtttaaggaaatcaacttcactgcaaatgtgggtattctgaaagaagaaagagttgaagctatgagaatgaatgaaatcagcgagggagagcaagtagggctagaaggctgttcaccgtctaggtgaacagagagagacagcgtgagaatagaccaatggagggaagattagtggagcatcataccccagcagtcacaggaagagagcttcggtgggtcagatggtcaacagtatcaaaatattcaacagagaccactctgtgggttttcaaatgataggatacacatcagcagtcctctgggaagaaaatgtcttctcccatatacagagaccctcataccatttggggacattgccccaaaaggacgggctttggcgtgaaagaacatttctaccccggctgtttgtgtgctgtcatcccaggtcagggctgaataatgaccacttggtagacctggtgctcacagagccttcatttggttgtataaggggccaaattcacctctcgatttccttttttcctttcagaatgcagtttccaagtacggctctcagttccaaggcaattcccagcacgacgccctggaattcctgctctggttgctggatcgtgtacatgaggacctggagggttcatcccgagggccggtgtcggagaaggtcggtcactctcaaaacaacacaatgtactgggttttctttttttcttttaaatattgactcagctcctcaaaactgaatcttgaaattgagattcttagattcctatatagtctggctactatatccacagtctgttccctgcttccttctcttagctgtgtttgttttacacaaggcgtttccttccattccagtatttctcattctctttgtcccagtgatataatgaatagagtttcattttggctcaaaataagaaaagtcttttctttggtttgtattccgtacattagtgtggtcatccaaggccatgagtaccgttccttattatttgcagatggtaccatttgaactctaccattgctttctcagttatgtattctacagagtaccaactgttaaacttttcctctcacgacacaggatggatgatttttacacatgtgcatttagcatccccaggttttgatggaaccccaaacctttcagaggaggaaagcactacaatcatttgtcataagcacagctaattgatacatcaggcgcagtctttatggactttgctcaatgatggcttatgctctaatgctagtcctttatcttgtacttaagaaagtgaaagtgaatgaagttactatattatgaaagcattcatccattctcacactgctataaagaaatacctgaggccgggcgcggtgactcacgcctgtaatcccagcactttggaaggctgaggcaggtagatcacttgaggtcaggagttcaagaccagcctggccaagatggcgaaaccccatctctattagtaatataaaaatgagccaggtgtggtggcatgctcctgtaatctcagctactcgggaggctgaggcaggagaatcctttgaatgtgggaggtggagtgagctgagaacgcaccgttgcactccagcctgggtgacatagtgaaactccgtctcaaaaaaaaaagaaaagaaaaaaaaggagacatacctgagactgggtaatttataagggaaagagatttaattgacttacagttccacatggctggggaggcctcaggaaacttacaatcatggtggaaggagaagtacgtacctccttcacaaggtggcaggaaagagagagagtgagggggaacagcccttataaaaccatcagatctcaggagaactcactcacaatcataagaacagcatgggggaaacttcctccatgatcctatcacctcccaccaggccctccctccacatgtggggattatggggattataatttgagatgagatttgggtggggacacagagccaaaccatgtcaatgagtgagcaaagttattttaacaacatctgtgaataatctgctgtaatagaagagaagtttcatgagctttgataattccatatcaatgagtgagcaaagttattttaactacatccacgaataatctgctgtaatagaagaaaagtttcatgagctttgataattaatcaataacacataccttttgacgtatcacatggctgatccagttgcagccatgagaactgttttaccagttttttggttttgttttaaatctggaaacattattctcattcttttcattaatcaaataaaaaaacccttggaaagtgcttagatctttcaaccatcaccttcccatcccttcagtgtttgctcagagcccgtcattctagcgtaataaagaatgaacagtgcaggaagcttagtcttttttttccttaaatttgtctgtttcctttatgttttccaactgttacctttctattttttttctcccttaaaatgtcaacttacaactttaagaaaaggaaaacataactatatatggtccatgtatcagagagattgggtaaccttctaaagccgcacagctaagtaaaggacagagtcaggattcaagcccaggggggtctggtttgaaaacctattttcatattttaaaaataatcaccccagtcattcccaaaacatacaaatgaaacgaagcaaacaatcaccacagtaaaacctgggaggaccacacattcaaaagtcatggtggtttctctgggttttgagattaggggtgatttcttttacttaccatgatttcctgtttatcttattctgaccccttttcgttgtgacagaaatttaacttagtctcacttaaggaaagggcatttattgacttttataacttgtgagtccaagggtcaaaccagcttcaggtagggctggatccagggactcagatcacgtcaacaggtctttgactatgtctctatcccttgtctctggctccattttcagactggctctgcccagatggtaagaagatggccttctgcaatgctcatgtagtctttagagcttgggattccagaaaaagcccagggaagagtccgattgtctcagcttggttcacatgtccattcctgggcatgtggccagaagaatggaatattctaattgggtgcagctgggttgcatgcctgtgggggtgaacgtgggccaaggagagcttttatagaaatggaacagtttgcttccccaaagaaaggaatgctgagcagataaacatatgtctactatactgtgtattccacaagtttatagtgaacacattttgaaatcagaaggatatattttttaaaaagatactgtttgtcgaatgtttgttatgtgccaggggtgtaacttgatgctttgcacaatttatttctctacctgacacagagtagacaataaactcttgaagtgattgactaaattagttatcatgctttactattataaggataactcctattttacagttaatggaaatttaggttaagttgctcaaggtcactcaacttctacttggtggagatagaattgaacctggctttgtctatttcaaagccagtgtgctgggttccttttcctaaagctttcctcatgctttctcaatttcccatggcgggagagaggagacttagaaataggtggtacctctttctgctggctgcgtaggaaaagccctcttatcctgttttttttactctctcctctccctggctgtaccaggcaggtcttcctacttgtaaggtaggtgggatagatagcctttccattttccttttctatctcttggtagcaggaaaaggcattgattgggcttaagggtggagaagatccccgagaggttaagtaacttgccccaagtcacacagttattaagtgagagaactaggacccaaatccagcaaactcaactctgtaacagggttccttaacttcaacactgttggatgtttgtggccgtttgattcttttctgagaacggctgtcctgttcatggtagcattagtagatgccagtctagatgccagtctagtaggcatctagactaggcatttgactatttgtgatagccaaaaatgtcttcagagattgccaaatgtcctttgggatgggaatggggatggtgacaaaatcaccattcccctaacccagttgagagctactgctctagaacctttgtttcttgctgtggtgcaccacccccagacctttctttaagataatattgtgtttatttaagccaagaaggcctggcaataattcttttttttgagatggagtcttgctgtgttgcccaggttggagtgcagtggcgtgatcttggctcaccacagcctccacctcccgggttcaagagattctcctgcctcagcctcctgagtagctggaactacaggcgtgtgccaccatgcctggctaatttttgtatttttagtagagacagggtttcgctatgttggccaggctggcctcgaactcctgacctcgtgatccgcctgccttggcctcccaaagtgctgagattacaagtgtgagccaccacgcccgaccaataattctttttaacaacttcaagacacaagtaaaagcagccataattggttttccaattttgaatatgtcccattgcaatatactccacaccaccactagatagaaaggaaataagagcttgtccctcttctgcttaaattcccccactggattccaatagcacgtagaacaaaattcagactcctatgtgactgacagggcccagcctgattccagacccctctgcccctcgctccctggccttgatctctccagctgcttcctgttccttaaggggccaggcatgttaggagtagaccagccaggcaagaccagggggtggctattggctagagagaggagcttaccccacccttggtttgacctgattgaaaccagaaaagatctctttctctgtctggggtcaaagcctctcctcaaatttgctctcagaaaattgggctgcctgcggaggcccggctgtgtacgcttgaaggtagagaacagagctgttgggattatccggcgtgaaacttcattttccctttcctagaaggaaagccactgtcctctgtgaaactctgattttttttctctttgaggttatttctgtttttaagacataggaaagctatgtagctagatttatttgaaactggaataaaaaccataagggccgctttcttttctgttaatttactgatcctcaaatgttttcatcctgcaaagagggcacatttttattaccctgttagaaaccctaacacaatctttttgtcagtttgctttccagaaaatgccgctcttgcagaattaagtaggggatgaggctggggagaagataaggaagttgacatatattaaacactgactatgtgcagggaagatacacaatacatgtcatctcttgggattttgtttatttttatttatttattttttttgagacagggcctcactctgttgcccaggctggagtgcagtggagtgatcatagctcactgcagtcttgacctcctgggctccagcactcctcctgcctcagcccccgactgagtagctgtgactacagggatgcaccaccacacctgcttaattttttagttttgtggatacaaggtctcactatgttgtccaggctggtttcaaactcctggattcaagcaatcctcccaccttggcctcccaaagtgctgggattacaggtgtgagccaccgtgcaggtcatcctttgtgattttaatggtagttccatgaaattgatgtgttagatgtagagtgagactcagagagagaggctgtcattcagctaacagagcagagccagcgtgaatgaccccctgctgcccctcactccagcctctttcagggttttctttctccatacccttccctgggtgatcctgtccatagcccctcccagtgctgttcagtgtcattgaacccattgaattcttgggttgcaagcaacagcaaccgacctgagctgactccaacaagaagggaacttaggagaaggccaaggagccccacgctcaatgacagggaaagctgaaggaccagcttggaactgtcaagaatcaggcagctgtgagggtatctcagcagcaggaactgctccattctcttccctggacagcacagcccacacaaatgttttcagtctttggccactctgttcatgattcacgttcagagtaggagcatctcagtgtggcttgcttgggtcatgggcctattccttggtaggtgagggcaggacccctgattaaagagccctccccatgcatggactggattcagggttccaaaacaggggttgctactaccaaaggaggaggagtggatacggggcagtcaaaataggctagggtccgctatgcatccaagttacctcctccaagtgcccttcccctatttgtcatgaatgtctctgcctggatattgagtcacctcaaacccagcatgcccatcccaaacccacgtctccttttgactttacctctctgtgaatggaacgggggttctccaggcaccagactggatccttggagttgatcacgttcctccactcccacagttgggggccgagtggtgagctacgtccacaggtgtcctgaatccatccctccttttcatcttcatgtctcctgttctaccttatcctgttgtttcctgaacccttgagcctcctaatctgtgtcctaacctccaaacttatgcttcttcatctgggagtcagtagctgccaagttaaagcatctctccgagcatgttgctaccatctgagttcaaaactcatcaggtactcctccttgtgtaataacaactgccacctacactgtgctttgtaccagacatgtttctaagtgttttgtatatatgatctctttttttttttttttgaggcagagtcttgatctgttgcccaggctggagtgcagtggtgcgatctcagctcactgcaacctccgcctcctgggctcaagcaattctcctccctcagcttcctgagtagctgggattacaggtgtgcaccaccacacccggctaatttttgtatttttagtagagacgggattttaccatgttggccaggctggtctcgaactcctgacctcaagtaatccactcacctcggcttcccaaagtgctgagattacaggcttgagccactgtattcagccttatgttttatatatatatataactctttaaatactcagagcatccctatcagacaggtactgtcattatccctttattatagttgagaaatcatggagcaaagagattaagtaacttttttagccggatcagagcagtcgagtaacttgtagtcaagtaccggtgtggggatttggatgttctttttttttttttttgagacaaagtcttgctctgtcacccaggctggaatgcagtggtgtgatctcagctcactgaaaactctgcctcccaggttaaagcgattctcctgtctcagcctcccaagtagctgggattacagatgtgcgccaccatgcctggctaatttatgtatttttggtagagatggggtttcaccatgttggccgggctggtcttgaactcctgacctcaggtgatccacccgcctcagcctcccgaagtgctggaattacaggcgtgagccactgctcccgcccagacattctttttgtttgtttgtttttgtttgtttgtatttttgagatggagttttgctcttgttgcccaggctggagtgcagtgtcgcaatctcggctcactgcaacctctgcctccagggttcaagtgattctcctgcctcggcctcctgagtatgtgggattacaggtgcctgccatcacgcctggctaattttttgtatttttggtagagacgaggtttcgccatattggccaggttggtcttgaacttctgacctcaggtgatccacccgccttggcctccaaaagtgctgggattacaggtgtcagccactgtgcccagcctggtttggacattcttgaccctggtaccatgctgttcactgagccaggtagtctctgttaggacatagaagcccccacccactgtggcaccagactcactttccagccctgttttctacttccctttgcacttcctgtattctagggaaactgggtgtcataaaatattaggacatataagaatgaccattttgagcactcataacttgtctcaatattttattatgaaaaatttcaaacatatggaaaagttgaattaattatgcagtaaacactcctccccatcacctagattctacaacttacgttgtactaaatttgctttatcacgcatttacccatctgtctctctatccactcattactcatatctttttttcccctcatcttattttcttggatgtactttgaagtaaattgcacaccttacccaagacgcttcacatatgttccttttgcctggttctgtcgtctgctttctaaaatccttcaacatttacccctaatgtcacccaggtctttacgtacacctcactgcctgcctgttcttctaaaggtatatatagacaggtgcacgatgtatctatggtattcaagtttcatggtggaaatgttaggaaaaattgtctaaaaagactccatggggggagtgatgatgaaaaagttgagaggtgctgctctagggcatattttatgtggggccttgcatagatttttttttttttttttttgagacggagtctcgctctgtcacccaggctggagtgc[282 bp omitted]gttatattatgagtggctttgattctgggattgcccttagggacagacctcttccagggcagaaattttggcataacagggccttaatcaaaatattgtgtcccatgtgtggtagggaatgggcagggggtgaagaataaatttagggaaactagaaaggtcatataactcattttggaagggataggggtccagaggagtttggtggcattagggcacacagaagccctgaggtgagataggctaaaaaatgacccccaaagatatgaggtcctaatcgctgcatcttgtagatgttgtctgtattagtctgttttcacactgctataaaggaatacctgagactgggtaacttacaaaagaaagaggtttaattgactcacagttccacatgactggggaggcctcaggaaacttacagtcatggtggaaggggaagcaggcaccgtcttcacaaggtgtcaggagagagaggagtgagcagcaaagggggaagcaccccttataaaaccatcagatctcatgagaactcactcactaacacgagaacagcatgggggaaccgcccccatgatccaatcacctcccaccaggtctctctctagacatgtggggattgtggggattacaattgaagatgagatttgggtagggacacagccaaattatatcattaccttctatggtaaagactttggagatgtgattaagaatcttgagatggggtcattaacctggattatcccagtgggccctaaatgcactaccagtgttcttgtgaaagagaagctgggggaaatttgagacacacacaggagaaagctatgtgaagacagagcagagagagagttgaagatgctaggcttgaaaactggagtgatgtggtcacaagccaaggaatgccggcagccaccagagttgaaagagtcaaggaacagactctcatctagagcctccggagggagtgcagccctgccaacaccttgatttcagtgccgtgatactgattttggatgtctgctcgtgagaactgtgagagagtaagctattgtttacagcccccagtttgtgataatttgctgtcacagccacaggaaacaaggaaatgcaaggggaatgaaaaggacagcaggactgatggacagagtgaaggaagcttgtgtaccaaattgaaaaacgaaaagcctcatttgcctgcaaaagagaatactcatgtgaaactgactcctgagaaaatgtgggcaggaatgatttagcaggcaggtggaaggtggagagatttggtgtggatgcgtttgaggtgatggcaagcccacccaataaatatacgagaggcatctagacattgaagccgagtgggacagaaataacgcgcagggccgtccatccagggggaacgggtgaggctggtgagaatgagcgagcatccaccaaggttcaggctcaggtttgctcttttaatgcacacacacttcttgtcccagagaatttgggaggtcaggggattgaaagagccttgagttatggtaaaggcagcactgaaggttgagactctacagaggcccagaaagggatgatgcgggcccaggaggaagcatgggctcggtggtctggaagcagttgagtgatgagaggtgtatctaatctggcttcctttcctcatttctttgcagcttccgcctgaagccactaaaacctctgagaactgcctgtcaccatcagctcagcttcctctaggtcaaagctttgtgcaaagccactttcaagcacaatataggtaagatggggatgtgtttagaatgtatcacccgagggctccgcagactcaattcctggtaaccagtctcccattgacagatttaccctgagatttcaaaacaacaaaaccacaaacacccttctctctcccattataaatcctgattaagcacacactcctgttgtctctgacctttggtatttcttcttttccttcttcttggcttctgagctctccaccttacttgaaggaggggtgataagaggatgattccacagaaggtaaatgtgagctgggatctcactagcaagcagtcactctgaagttggagagacccttcctgtttgttctctctccagagagcccaacttaacaagtcattctgagctcaagagttccaagcgttatggaggatataaaaatgtatgtacagcctgggcaacatagggagaccccatctgtaccaaaaaaaaccacaaaaaacaaaaacaaaacctagccgggtgtggcacgtgcctgtggtcccagctactcgggaggctgagataggaggattgcttggacccaggaggtcaaggctgtgatcgaggctggcgtacagtgagccgtgatcgcaccactgtactccagcctgggcaacagagtgaaaccctatctcaaaaaaaaagtaaataaataaataaacaaacaataaaaaaagttatacagcctttgacttcagaaagtatgtgttctctttgagcttttatatgtgaaagtgcagagattcatacaaggcagaatcgtttcaatattataatgttcagtgaaagcgctgacagcagtgaaaggtcagagaggggagaaaaccccatggacttctcagaggaagtgtgccttttgttggcctctgcaggatgaatagaagtacgaatgggtaggaagatagtcaacaggaacaaatgcaagcttaaaggtgggaatgagcacagtggtcgggatttagacgaggaagccattggttacagagagcctcctctaagatgcttgcctgtgtgtgtatatgtgtgtgtgcatgtgtgcgtgcacgtgtgcgcgtgtctgtgtgttgccaatatatataatcatgcgtttatatgtgtgtgtgtgtctatatatattttaagccttacaaaagtctcaggggatgagtattaaaatttgggaagttgggctttttctacagacacatggtaagtggcagaaccaggatttgtcccctgaaatatgtctaaagcacaagtcctgcctttttgccttctttgcaatttttctgtttttccagctaaccttgttcattcactgtgattctctgctgctccttcaatttcacaggaactctgttctctattatggataccaaaacaagttttttgtatttttcttctggatgttgcactaaatcatttcgaagccatgcttttctccgagtcgtctggataatatttcctttgcatttctctgcagtggttttttggaggtctccaggtggttttcttctcttattgacttctcttcaaacaaggagataattattcagtcttctagaatttccttgcttatagccatttacttccatactttttggggatttgtattctttgtgtttgcacagcaagaggtcacttaaaactgcccggaaactatcctgatttaggattcatgttatattcaataaccactgaaaagataaataggatataattactgtctttagaggctgattgtttatttaggaagaccaaatagtctttgaaactaagctgctttccactggtgaagaaaaatctatagcacttgacaagttctctcacgctctgcctcaccagggacagggaccctgaagaaacagccgggatgactgcgggctcttcgttcctgcttgcttgaggttgtttagtatacagggtaaagaggatctcacctctatgagctcagatttctctgtcatgcctgaagaaagccttgctcatttcctgagggatgtggtaactctccaggaggtatgcagagaggaaacctagattttgtggtcaccagccttgaaagctattggccatgaaagccgcttgtagggcatctgtcttatttatttatttattgagacagagtctccctctgttgcccaggctagagtgcaatggcacgatcttggttcactgcaacctccacttcccgggttcaagtgattttcctgcctcagcctcctgagtagctgggattacaggtgcgtgccaccatgcctggctaattttttttttttttttaatttttagtagagatggggttttaccatgttggtcaggctggtctcgaactcctgaccttgtgatccacctgcctcggcctcccaaagtgttgggattacagacctgagccaccacgcccggccgggcatctgtctcctcttcaggtgcccaacgcagagggtgctagaaccaaaaataaggagacagaggaaaagcatagagaaagtgaaagaagaacatttagaacaagggaaaggggagtataaggtgaaggcatgttagagagaggggagagatcactgatcatcgccagcaggtcgaattcatctgtgtgcttgtacaattaattcacctatttctctattcatttcccctctcgtccacatactcttcttccttctttcaaatattcaagtgcctgctaatgtgcttggtccaatagttaccatgaggagtagaactcctggctgaatccttgttgattctttagatatttcattcatgccctactgcgtgctgggttgtcttgtaggtgctgtgaacaagactcagcccctgttctcagggagctcgcattctacctgggggaatgctagataatgtacaagtaaacaacaacctgtgatagccatcagcagaaagataaggaagcacttgggaggcggggaagtggcccacattccataaggcgggcagggactaggcttcttttcggagctgaaaacagagtgacaaggagtctgccattttaataactgggcacagagtattccaggcagaggacacagcacaggcaaagggccagaagtgggaataatcctggcaagttcaaggaatggaaagcccaaggtagctgccaaggagtgagtagagcagctgggattacaggcatgcgctggagatggctggagaggtgggtggggacctggtagggcaggttttcagtccaagtgtgcgggttttagtctcaagggcacaggaagacactgcagagttaaaggagggagtgatctagttcattagtttcagaggtgactgctttttttttttttttttgagacggagtcttatgctatcacccaggctggagtgcagtggcgcagtctcggctcactgcaacctctgcttcccaggttcaagccattctcctgcctcggcctcccaagtagctgggactacaggcgtgtgccaccatgcccagcaaatttttgtatttttagtagagatggggtttc[142 bp omitted]gaggaggcaggagcaacagttggtgccactgtggtcccagtgggagagcaatggtggttggaactgcagaggtggcggtagagatggagggaagtggaggggtttggagtatgtttttggatggagagtcagcatctttccattagtccttccaccccacaaccctcaccccagtcttgctaacggggtgaggggtagaggaactaagggagaggtgagactctagggtgactcttgggtttttctatgattataactggtgagtactttggaggaaaaatcgagggtgctttgaagtacatgcctgacttggcgtgggatgaatcgggggtggggaggacttccgagggagtgacatttgagctgattggatattaaggaccatcaatgccctttgggtattttttcctatagcatgatgagtaagaggcgaggtgttcacgctaaagatgaactggcaatggctaaaaatgccagctttgtgcctgctgataaagacaaggtgtcgtcagggatgccttgaggtctgaggggtggttttctgcagtggtcagtgggggaagtgcctggctggcgtctcctgctgtccctgactctctcctggcttcctctccctggggagggcttgcctgggatggcatcagccttcttgatgtaattgagagatggatgttattatgggttaattcagaggcatcttcccttaaaccccttttaaggggctgagtttttgactttggctgggggagagaaaaggaacctccagtactagagtaccgaagatcctggactatagcaaagatatttagttattctatgtgattatcatcacagtctaaaaatgtctgcaagtctaacgaccaacgattgtggctatgttggagttttggctggaggagggagtgtgtgtgtgtgtgtgtgtgcacaaattcttcatgtccttcatagcctttatccacagaaagtctaaggatgtttttgaaggcttcctcagaacagatcttggaaaggtgagatcttgcttacgtattggcataattactgttgtttgcatagacgtcagatccactgttcagtgagcaggtaaagtggactgggtttgaggtgaaagatgtgtgtgtatttggcagcagttaaagggcagagtgacaagaaattcaggggcaaagcctggggctctttggtgggcgtttgtagcaggtggaaaagcaaaccgcagccctgagttttaatagcactgacgggattagctttgttaacagaagcaatttgacaaggagaatgaataccttagggaaatgggcctgtgaacattgaaaggcagtggggtgattttctgttccttttccccttgagtgcacttgtgagacaacagggcaggactgtgaatgtcctggagggaatggggagaatggaggcatccatcaggccacataggggtattgctctagcctggtaacatgggcagaactttttgtaaaagtgaagctgcctctccatcttcttcagatctgtttgtcacatcagtctgtcctgatttctgaacctttgacacgtggatgtatttgacatctttcctatagtttattatgaaaacattatactttttcattctttattttatttttatttttttgagacagagttttgctcttgtcacccatgctggagtgcaatggcgcgatctcagctcactgcaacctccgcctcccgggtgcaagcgattcttctgcctcaacttcccaagtagctgggattacagtcacctgccaccacgcccggctaatttttgtatttttagtagagatggggtttcaccatgttgaccgggttggtctcgaacttctgacctcaggtgattgcccacctcggcctcccgaaatgctggaattacaggcgtgaaccactgcgcctggccatcgttttcattctttcaatataaaatttgcccattctactttttttctacaaaccactcatcgcttgctagctgataggagttggtggctcaatgtaaaagtcatattcctgaaccagtttaatatgtcgcaatgcttcaagaaaaatgcaacccagcatagttttggtaggctgaaaagcatgaagacgtcaatgaaaaacattctctctcattggtttatatacttgtgaaatgggaatttgggaatttcccaatgacccaagtatatccttcaggccaattttttgcctaggtacgtgatggacagaggtggagaaggattggaggagagacgcagtggcagaggagaccccagaaatgttggatttctggctggctggtgttcactgtctgatacaatgctttcaacaaaaacactaccatgggtctcccaaagggaaatgacctgaggcagcatgagtgatggaatgtccagtactggggcctgtttcctataatcaggttgatggtctgataagttgtatccaagataactgacttaaatgggcagatcacccaggattgcctcgggcgacactctcctgtttatgttcctgtttgtccctggattttcctatttgtctgctcagtggaaaaccaatcaaacgagacgggcactttccacaaggactcaggaaacctgttctgataccaactttggcttacttgctgacttatcccggtaatgtcatacagtgctaagagtatagacttcagagtcagactgccagggcggtcttgttctgtgtcctcagcgaagttaatgtagattttaggattagtaacatagcatgcagaaatcccttgtgtcttggaagaatatggtgcattatatgataagagaaaga[136 bp omitted]tagtgaatcccccgtctctactgaaaaaaatacaaaaattagccgggcgtggtggcaggcacctgtaattccagctactcaggaggctgaggcaggagaatcgcttgaatctgggaggcagaggttgcagtgagtcgagatcgcgccattgcactctagcccgggtgacagtgcgagactccgtctccaaaaacaaacaaaaaaaagttgcatttcactttcagagatccattctaaagtaaaggagtattaagtttaaaagagttgaaagaatataaatgaacattatatatatctactctgaaccaactgacacctcaccgacttctacgaaagaacgcaggaatgatatgagcacggagtctggaaactgagcctagctttcttacttaagagctgtgtgttcttcagcaaattacttaacctctgtgtgcttcagatttctcttctgtaaaatgtgtataatatcagttgctatgggtggtaaatgggttcatctatgctaagtgctcagaattatgcttggttcttagtacatgctatttccatgttagttattactttaaggagctatttcttatggtttcttcttctgtacaataaggagggtgggcagtgtcagtgattctctactatgggagaacactagggtcatctggggagcttaaaagctcaggattttagaaagattttgatgtctggacccctctctacccaccttgaaacagaatctctgggagtggggcctggacattggaattttaaaaaagccttcctgtggttctggggcacagtgaggctgagaagcaggggaagagatggtcctgagatcccttcagcttggaagttggcatgctgggtttgtatggcaggggcgggttatagcttcccttcccatactcagtgcatttatgtgtgtcactaaacattcttttcccttttaaaaaaacggaggtgaaagtcctgtaacataaagttaagcattctaaagcgtacaaatcagtgacatgtacattcacagtgttgtgcagctaccacctcctagttcctaaacatttcatcaccccaaaataaaacctggtacccagtaagcagtcagcctcatcctcccttccctcagctcctggcaaccaccaatttgctttctgtgtctatggcattacctgttctggatacttcatataaacgggatcgtacaatatgtgggctttcatgtctggcttctttcacttagcgtgctgttttcaaggttcatccacgttgtagtatggaccaggggttcattcctttctatggctgagttgtactctactatgtggacgtatcatattctgtttacccatttgtctgttgatggacggttgggttgttcccaccttaactattgtgaatagagcagctatgaacacttgtgtacaagtatttgaacacctgttctcaattcttctgggtatgtacctacgagtggaatcacagggagtggaaatgcaaggataattctgtattgaattttacccccaaattgtttacgtgtgattaaacgttcgcctctgttcttcaccctcacagatcttccttgacttgtccccactgcctgaaacagagcaacacctttgatcctttcctgtgtgtgtccctacctatccccttgcgccagacgaggtacgtgagtgtcgcggcttgcccggtgaacttgacttccatccttactcattacggggaagcttctggcctcacacctgccattttctctcctttgcttctcagccagcatttctctggaaaccagccttatagctggatgacattcaactattgaaattgacagagtgaaaggttactgtgttccttctctagctgaggaaggaattatgaatgtttggcacaattgccagacttagatctgtggcccattcagaagctggcacggacccattggtctcacttagtgagacaggggcaaactagagaaaatccgtggccacctgcttttttttccccagctttacttcaacttcaaaaatctattttcttctttgagaaggtgcaggaaaaagatttctttaaggagcaaagaaagaggaaaggggttgtttggggaagatgagaaaaaaaaagaaaagtggaggtagggctgggtaacaggcaccatgggccgagttctataaaaataagcccaaatcttagcagtgaccaggaaggcaaatggccaatgtcagtgtcctggcatgtgggtgagctcctatgtggggtgtcttctctggcattggaagagaggtatttcctctttatgttccccacctccttaagtgccatttctcttaccctcttcctattgacatcccctgcctttaggatgcagctgaagacataacatcttcagagggccttgcttggcaactcaatctccctttctgctctaaaattgtgtgctgctgatcttctgcactacaaatataactactggcttatgctataacatggcttatgctgtctatcatcagtgacaccatcagataatgtcaacttatagatgtgatgatctaagactcccagcctgacacagcacagcagagtggtcaagaccactgactctggagccagacggcccaggttcgaatcccagctctattaattaattacctgtgtgacttgggcagttattggagtacagatcaagagaaacagtagctgcaagagtgggccttcatatgccggtgggaaggggaagcagagatttccaaaggagactctcattaaggagaatgtcatcagtagtgttgatttgtactgaaaaaaacaccttgactgctttaattttcaaactttggagtttgtttttgtttaagcttatctatttaacaactagagccttgagatcggacatctctatggtgattcttaatcaaatactttttcccccaattctctggaaaagtaatttagaagatttggctctaccctgccacctggtgacaatgtaccaagtacagggacacaaccaggaagcggagattaactatgtgctgaacttgatccattatctttctttctttctttctttttgagatggagtcttgctgtgtcacccaggctggagtgcagtggtgccatctctgctcactacaagctccgcctctcaggttcaagcgattctcctgcctcagcctcccaagtagctgggattacaggcatccgccaccacactcagctaatttttttgtacttttagtagagatggggtttcaccatgctggccaggctagtctcgaactcttgaccgcaggtgatccacctgcttcagcctcccaaaatgctaggattacaggtgtgagccactgcgcctggccttgatccattatcaacaatgtcattcacagttcatgtcagtcctttaagggtgttgccccttcctattttccaggttcttgagtgtcaccttggtcttcccctctaagagccagcggttcctgcgggttggcctggccgtgccgatcctcagcacagtggcagccctgaggaagatggttgcagaggaaggaggcgtccctgcagatgaggtgtgatagaattgcactggggcctggtcattggatgatagaatgctaactgagccagctgtctaggctgtttaggccaatttgtggttcccaggtgactccagtatgactcatgggtttctggttgattagtaatgcctgctgtctgggatgactgggccttgacttttccctgcattgacacagaatgaccagaaaagaacacctttgccttccgagaaggcaatgacaattatgatcataataattccagcaatagctacccctaggtagtgcttactaagtgtggggcactattctgtgaactttctattcatgcctgatttaatcacaggcgtcctgtgaagtagacattacaattatcctcatcttactaatggggaataaagaagccctgagaggttaagtgacttgcccaacgtcactagctagtaagtggctgagccaggatttggatttcgatggtttgacttcatagcccaagtcaccattgtatattttcagtcttggcaatataaaccaggacagtaaaggaacagtaaatgaagcaggaggacctgctgagagaactgaggatgtataacatgagagagaacatctggcggaagctgggatggctgtgttctacctgttttcttttcaaacgagtcttagtaaagcgattggattcacagtgcctggaggggccctcatgaggaatagggaggaggccgtggtggcgccaagccacatggcaggatgggagcggccctcagggtgattcagtagctccctaggtttctgaccctggacacagtatgtgattggctctgtgtccttaactgtgacatggaaattgacacttccctgactatctcatgggattttttcaaatcaaaaaatatttttaaccttgttgggaaggcatgccacacatacaataacgtctacctatctgaagattgtggtttgctggctttctctacgttcatagctacattcctataacctccacgcttcctgagcctccccatcaccccagtgggctcctttctgcccctgcccaatcaatccctctgacctctatcgctacctcatagaatatttatgactctctcaaatagcaggggaaatgtgtgtatcttgctttgtaaactttaaagtgcactatggggagttactgaaagagacggagagagagggggacagtgggtgagagtcctggggagaaagtgacagtaagaaaagatcaaaagggagaagtctatgagagggagcgtttgaataattaagagtgtgaaaaatctggcaggaatttgagaggtgtgatgtgttggttcagggagatgggagtcagttggggatgccagtgtgggacgggcatttccactgaaactgaaagtcatctattttgatgctttgttttctttaactggcaagtgtattatatttatgttatataaaatcatagatatatgtacttggatttatttttctattttatttatttattttttgacggagtctccctctgtcgccaggctggagtgcagtggcacgatctcggctcactgcaacctccgcctcccaggttcaa[135 bp omitted]acctcccaaagtgttgggattacaggcgtgagccactgcgcccggcctgtatttggatttatttatgtcatcttatttatttatgtcatcttatgctatttaccctgttttcctattttgtaccgcccctccccccccatttttagattgaacagtctttttcttttagaagatgattcttttacattgagcaatttttctttatttcatcttttctgggatgaagtacatccagaagatgtacttcatgtacatgtcaatatgtatatgtaaatataatatatacattatatttccattcttttagtggttactaaaatgtcaacttgcataattacgagtctaaagccaatcttcccatgtaacacaaggatcttggtatgcattaaatccccttatacctttttgatttagatattattgtccagtattttaatcccttctccacctccaactgtaatagtaataatagttattattttagctttatatagttgataatatttacctttgccaatgtttaccattttctttggttcatcatttcttcctacaactcaagttttctctttgattcaggtttttaaatcctgaaatctatgtatttatgaatgaatgaatgaatgaatgacagggttttcctctgttgcccaggctggagtgcaggggtgtgatcatagcttgctgcagccttgaactcctgggctcaagggatcctcccacctcagcctcctgagtagctgggactacaggctcatgccaccatgcctggctaattttttaaaaaaattgtgtagagatgtggtcttgctgtattgttcaggctggtcttgaactcctgggctcaagtgaccctccctcctcagcctcccaaagtgttgggattataggcatgagccacggtgcc[137 bp omitted]tgcctcagcctccgtagtagctgggactacaggcacccaaaatgcatctttttaacgagaacttcccaggcagtgtaccttgaataggttatgtgtgctgagatattgatttcttcagcatcagggtaacagagttgggtctagggcagtcagggcccccacagtagtcacccctctactctgctacaaaaccatctcctatttacttcaatgtttggtaaaaattttttttatgtatgcaatcacgtgaaaaaggttagtaaacctattcagaaattctttcactctgtagtaaacactcactttttgttcacatgaagagggctttattttgttgtcatttttctatgcttgtttagctgggtataaaacttagattttttttttttttttcagtttctttttttgttgcacttgagatgtctgaggacaatctaatggttgtatctactatgctgccttattactaaaaataagtagccaattggaaggaaaaggtgaaaaatgggtgttgactatcagtcacttttagatttcttatctgttgatttctctttcagaaatcaagagggaaaatgatctttctcatttcaggtgatcttggttgaactgtatcccagtggattccagcggtctttctttgatgaagaggacctgaataccatcgcagagggagataatgtgtatgcctttcaagttcctccctcacccagccaggggactctctcaggtataacaggtgctttgcacaattttatttggctatgatgagttacaggtttcagaggatactccttgggtgcaaaggcataaaacatccaattttagcacttggaacagtcagacttattatccctggcattcgttgtgtgcagatggttgatattaaaaattattcacctaacacaagtattctcaaaactaagcttagtgaatattagaatcacctggagggcgtgtgaaagcagatttctggaccctacccacagagtttatgatttgggtggcctggggtggggcctaagagtttgcacatctaaccaagttcccaggtgatgccgatgctgctggtccaggaaccacactttgagaaccactatttggtatagatgctggagtcatctttgccgtcaggattcctatgggtcaagatttgtgtgtgaagtaaaatgtctacaaatttgagcagtacgtggttaaagttttattaaatgactttttaacaaaatagttccacttcttaatgcttgcttttcctattccatggactggctaacatggtcaatttctaacagtcctttttatttgtagatcaggatacattttggccaagttagtgaagaagacccatatatatattatatattatatgtaatatataaaatatatgttatctattacatataatatataatatatataaaatgtatattatatatcatatataatataatatatgacatatactatataatatatactatataatatatactatataatatatactatataatatatactatataatatatactatataatatactatataatatatactatataatatatacattatatagaatatattatataatatatatttaatatgtatttaatatatttgatatatatttaataattatatatgttatatataatatagataaatatatataaatatatatataaataaatatatatataaataaaataaataaaataaataaatatatataaataaatataatatagataaatatgtaatatattatatagctaaatatctatattatatatagataaatatatataaaatatattatatatatatatatatatatatatatatatatatatatatatatatttgagatggtttctcactctgtcacccaggctggagtgcagtggcgtgatcttggctcactgcaacctccacctcctgggttcaagtgattctcctgcctcagcctcccaagtagctgggactacaggtgtctgccaccacgcttggctagtttttgtatttttagtagagatggggtttcaccatgttggccaggctggtctcgaactcctaacctcaggtgatccacctgcctcagcctccgaaagtcctgggattacaggtgtgagccaccacacccggccagaaggcccatatttaaaggaccctgtgccagtgttactttataccccagatgattcctacgccctggccccacattttggccagcctaggtagcaggctatgggaactggatgtttgaagttctctgagttgacagggagatgctgggcattggaatctagaacaagacattaactgacactgactatattacaacccagtgaaacaagttctcctttcaaattcaatcatggtggacacatcttttccttgaaagtcaacatttcagaactgattgcaaatggaggctagtccaattcctctacttcctcactggtaaagattctcacccatctctatatacttcttatgttggctttctaagagagtagataaactggggactctgtaatgaagtcataaaagcaaccaaaattattttggagtatttttcaggtgacttgaaatatattagttaaattcttgttcctgttttaaaactatagggtgatggccaggtgcagtggctcacgcctgaaatcccaacactttgggaggccaaggcaggaggatcacttgaggtcaggagttcaagaccagcttggccaacatggtgaaaccccatctctactaagaatacaaaaaaattagctgggcgtggtggtgcacatccacaatcccagctactggagaggctgagacaggagaatcatttgaacctggaaggtagagtttgcagtgagccaagattgtgccactgtactccatccagcctgggggacagagcgagactctgtcttaaacaaacaaaaaactattgggtgaacacaattgcaaattcactaccatattcttgatgttcgtatgccaggcgtcagatggcacaaatgccatgaacctcattatctcctcccctaaagccctctagtggccccccattggtggttaatagatgctcaaagagaaagagggactagagaagctaaggctctgacccaggaaagcagctcctttaggaatatgaacaaatgtcattctctcccttctagctcatccactgggtctgtcggcctccccacgcctggcagcccgtgagggccagcgattctccctctctctccacagtgagagcaaggtgctaatcctcttctgtaacttggtggggtcagggcagcaggctagcaggtatgtttcactttattcttttttcatgtggtgtctgggatttgtagacctgtacttgggagcctgtctagagtaaaattaaacatttattcccaaggttaataaactaggagccagaagtagggtcctttctgattaagaggattagaaatatctgccttaagcatttggctaacgtcatcattcctaaccatcagacatcagaggccttcctattaatcggaggaacaatttttactgccttcaccactgttattttatattgtaaaacctaggcggtgcagtgctaaaagaaactggctataagaaaagaggtgataatttggttgtctgtccagaaaaccaagaactggaaagtgattggcagtaaggaaagggttcaggaaattgatgggttatataacaaatatacaaaaacagatagctttcttatatagcccaaataaagtgtttaaaagacagaattacattaagatatatttagatggataaaatgtttctaaaaatgtatcttgaataataaactggtaaaaacaaaaagattatttaataataattaaactattattaattagctcagcttttaaaaatcaattagcccagccttacttattgaataattcattaactcttagtaatatgaaatacatcatttttatcatgtaataaatacttacagatagttggtctattttgtttgatttaattgcatattcttctgcctgtattacaatattttaataatttcagaattatggtatatttcatattactacagagtgagtgaattgttcaaaagtaaggctgggctaattgatttctttgttgctttttattttaaatagtcaactttttactcctgctatgaattcacacgtataaatttcaggttgactagagaggtaactagagaaaaggaagccatgaaataacttaaagatggccgaggtgggtggatcatgaggtcaggagttcgagaccatcctggctaacacggtgaaaccccatctctactaaaagtacaaaaaactatccaggtgtggtggcacgcacctgtagttccagctacttgggaggctatggcaggagaatcgcttgaacccaggaggcaaatgttgcagtcggccgagattgcaccactgcactccagcctgggcgacagatcgagactgtctcaaaaaaaaattaataaataaaaaataaaaaataaattaataaagacaacatgggagaatatttatgtccttgggtgggggctagtttaacatcaaagtcaggaggctgtaaaggaaaaggctgatgttttaaatatatttaaaaatttaaactaaaagcaaatttgaaaggcaaaggacaaatgaggaaagatatttatgccatgtgagaggtgaaggatttatgtccatcctcgaattttccagctcttgaaaattaaggagataaatacccttggtgaaatgaaccacagagatgaacattagt[132 bp omitted]gaccaatatggagaaaccccatccctactaaaaatacaaaagtagccgggcatggtggctcacgcctgtaatcccaactactcgggaggctgaggcaggagaattgcttgaacccgggaggcggaggttgcggtgagccgagattgtgccactgcactccagcctgggcaacaagagtgaaactccatctcaaaaaaaaaaaaaaaaaaaaaaatcagcatcatttgtagtgggagaaattctggttgcaatagcaagatactattcttaacctcttagattgttaaatgatttttagaaattgataatactcattctgggccagagtccggggaatcaggtaaattggtatggcttctttggaggacagtttgggaagaaagagctttagtcttgtctttctacttctggaactttaccctaagggaataattgtgcgctcaaaggttatgtccaaggttatatctagttcctgcgataagcaagcattgtttaaataaaaacttggaatgcctcacagtacaggatggattaagtaaaccgatctgtccatacaacaatggacgcacagtgcccttgcctgtccagacagatcacctcatatttgtgttctgctttagccaattttattcaacaatttcacattcttacctcattgggtcttcacacaggctgcagcgaggccaggaagcagtgagtcgctagtgatttgtccaggagtacccacggcagagttagggcccataggcgcaggctcacccagcattctgtacaccatgagctcactgctgtgcgcttactatgttgggacatggataccatcccagtgatgagaatattctcgataccccaaccaaagttgtgtcatctggatttatgtctctgccttgccttcccctggctccaagcttgtcttactctattccctgctgtgagtaagagattttgccagctagctggtcattttgagtaatctgtttacacagcagcatctacctggctttgtgtcactgggcctctgcttacattgcagtgtctccatttgttacaaggttctctgattggcaattttgtattgtgtttggctttaaaaagcatttacattatttttaatcgacacataattgtacatatttatggggtacggagtgatattttgatacatgtacatagtgtgtaatgatcaaatcagggtaattggcataaccgtcacctcaaacatttatcatttctttgtgttgggaagattcaaaatcctatcctctagctattgaaagcatacaataaattattgttaacaatagtcactctatattgctatagaacactagagcttatttctcctatctagctataatttttattcattacctaaccttttcctagcccccactggcgcctcccagcctctagtagaaccactattctactctacttctgtgacattaacttttttagattccacatgagggagtacatgcagtatttatctttctgtgcctgacttatttcacttaacataatgtcctccagcctcatccatcttgccgcaaacaacaggatttcatttcttttttatgggtgcatagtattccgttgtgtatatagaccacattttctttttcatttcttttccattcatccaccgatgtacacttaggttgatttggaatcttggctattgtgaatagccctgcagtaaacacaggagtgcagagatctctttgacatgatgatctttcctttggataaatacccagtagtgggatggctgggtcacatggtggttctatttttagttttttgaagaacctccatgcttttctccacggtgtctccattcccaccaacagtgtataagagttcccttttctccatatcctcaccagcatttgttatttcttgtctttttgataatagccatcctaactggggtaagatgatatctcattggggttttgacttgcatttccctgataattagtgatgttgggcattttttcatatgcctgttggctacgtgtgtcattttgagaaatgtctattcagaccctttgcccatttttaaatgggattctttggttttttttgctgttgagtttttgtgcttagctcttgtcacttatcctattgacaggaagccagggttagaacaaccactcatgactggtggatgttgctggtttttcctttgctgggataacccgatttccttggattttcaggtttgggccacccttcctgataagggaagacagagctgtttcctgggcccagctccagcagtctatcctcagcaaggtccgccatcttatgaagagtgaggcccctgtacaggtcagtggtgtgcatgcgtgtgtgtgtgtgtgcgtgcatgcgcatgtgcatgcgtgtgtgtgggtgtgtgtattgggaggggtggaatttagtgtagcccaggagaggataatttgctgttaaagagtgttcatactgttttataaaatgacttagatttatttgcaaggaagtaaccatcttatagtctgtagtgttttacttttgtgccattacaaaatacctttcatgggcagagctttttcttattaaatctttcaaaacaccattgggaaaatggcatttacattaaaacgaaattttttttttcacattttccatcattccctaagcatttacattattattcccaattttgtatgtttatggcttaccatagtttttcctagaagatagcatattataataaattgtaacttttatgtttaaatcaacaatttcaagggacttgagatagaatttctgggaaaattaaaatggatgattatgtccaaatatgaaaatctaaatgttaaaataagtttgtccagttttttaaaaactaagataactcaaaggaaaacatttgccttatttatttattctcagattggtagtttccaaacaaaaacagcatgtttaaaaactattgattttttgtttttagctcctataatatcagaaactattctgatggttgcttgacacagaagatgttgaaatttttagggacaggtcagttgtgtcagattcctattgtcccctaactattcccatagtaaaagctttttatttggggcacacacagatcttatctcagagataattcctcataattcatgttccttcctgctcagcaaaaaccatatgtttgatttaggatttataccaaataacattttgttaaaaaccttcactacatttgtcccaacttttatctctaaaggattttgttcaatgtactgtagatcagatccaccaaagtgcccaaattagaaactcctctgcaagtaggtcagtctatccggtgagagttttgccttctcccaaaccttgagctactgattatcgcaatggatgaaactatgctttttttgtttgtttgtttgttttttgagacggagtctcactctgtcgcccaggctggagtgcagtggcgtgatctcggctcactgcaagctccgcctcccgggttcacgccattcttctgcctcagcctcccaagtagctgggactacaggcgcccgccaccacgcccagctaacttttttgtattttttagtagagacggggtttcactgtgttagccaggatggtctcgatctcttgacctcgtgatccactggcctcggcctcccagagtgctgggattacaggtgtgagccaccgtgcccggccagatgaaactaatttcatgtgagcatttaactcagccatccttactcttacctgctcacactcctgtcctgttttttttttttgagatggagtctcgctctgtcaccaggctggagtgcagtggcgtgatctcggcttactgcaacctccgcctcccaggttcaagcgattctcctgcctcagcctcccaagtagctaggactacaggcaagcgccaccacacccagctaatttttgtatatttagtagacacggggtttcaccat[136 bp omitted]gctttattttatttttgaggcagggtctcactctgacacccaggctggagtgccgtggtgcggtaatggctcactgcatctttgacctcccaggctcaagtgatcctcctgcctccgcctcctgagtagctgggactgcaggtgtatggtaccgtacccagctaacttttttttgtttgtttgttagagacagtttcaccattttgcctagagtgatcttgaactcccgggctcagttgatccatctgcctcagcctcccaaagtgttgggattacaggtgtgagccactgtgcccagcccaatttcaattttagaaatggatcaagcaatcaatggggccagcaaaatactaatacgggcaacctttgactcagccacagatgctttttcacagattcacgggtgaatgtatggtcagacatgcttttctgtaggagtaatgtgttctagatggttgtgaggcttccaggctagccaacccatttaacccataattcttttaatactatattaaatactggttcaaatatagtcatttgaagagaatatattcaggagtctcaacattgaactgaagagattaaacatattgtattgaaggtttggacatgaacttccctagccaagaattgagaacaggaaagtttcttacaaaaatgaccagtttactggataggattaatttgcatgtattatgaaaaaaataaaagctatcaatgccaattttttttttttttaaagagatagagtcccactctgttggccaggctggagtgtggtggtgtgatcatagctcactgcagccttgaactcctgggctcaagtgatcctcccacctcatccttgcaagtagctgggactacaagcacctgccatcatgcctggttaattattttaatttttttgcagtgatagggtctcactgtgttgcccaggttggtcttgaactcctggcctcaagaagtcctcccacattggcctcccgaagtgctgggattacaggcatgagccaccatgcctggctacccaaacacttttatggtattttgtaaacgggggtgtgtgaggccagcactatttgtgtgcaggcagagtaggctgcctctgtgcagatgttggtgccgtaatgatggctgacttttgctgtccaaacaacaaggctccattaggggcggaggaaaaagagtcttctcccccagatttaaattaacattctccttagggagaatacccttccgtggccaaccctcaatcaaagcccctgaagtcatcttacttccagacgttgatttcgtctttgttgaagccgtagacgaactggaacgtggttagagtctggctagacgtatgagctccctgcccttcacactcaagaccccctgcagcccagttccagtttacccaccagccttgtggccgatgctccctgcacacgtcagctcccacagccaaaggggtcggctcacaactctctgcatctgtttcgggtcattctgtcctaccatgtgtcattcctctttcctggaattatgatgcttttctcttgttttcctctcataattcaacctaggtttcctccatggtttttaagaaaacatgtctgccttttacctttgtcagagtttggaagaaaattttattttatttctggttgtcaagatcatcagtgacaaatttaagcacctatttcttttatttgaatgaagaccccgttgattttttaaaaaattttggtaaaagatatatacatttatttattttaaccactcataagtgtatattaattacatttacaatgttgtatcaccatcactactatgtatactcccgattttttcatcatcaacaaaaactttattaaacattatactgattaaaacaaaaaccttatacctattaaaaaactaaaatgttgccagacgtggtggctcacgcctgtactcccagcactttgggaggccgaggcaggtggatcacctgaggtcaggagctcaagaccaacctggccaacatggtgaaaccccatctttactaaaaatacaaaaattagccaggtgtggtggcaggtgcctgtaatcccagctactcgggaggctgaggcaagggaatcacttgaactggagaggaggagtttgtagtgagccgagatcgcaccactgcattccagcctgggtgacagagcaagactgtctcaaacaaacaaacaaactatacctattaaacaacaattccacgttttctcctctgcctagctccttgtagctaccattctactttctatctgtatgaattttcctgttttaggtaccttatataactagaataatataatatttatctttttacatctggcttatttcactaaatgtcatgttttcaagggtcatctgtgttgtagcatatctcagaatttccttcatttttttttttttctttttttttgagatggagcttcactcttgttgctcaggctggagtgcaatggcgtgatctcagctcactgcaacctccacctcccagattcaactgattctcctgcctcagcctcctgagtagctgggattacaggcacccgccaccacacctggctatttttttttgtatttttagtagagatgtagcttctccatgttggtcaggctgatctcgaactcctgacctcaggtgatccatctgcctcagcctcccagagtgctgggattacaggcgtgagccaccgcgctgggctgccttcatttttaaggctaaataatattctgttgtgtatatatcccacattttgtttatccattgttggtggacactcaggttgtttctttcttttgacttgtgaatcatgctgccgtgaacattggtgtataaatatctgttcaagcccctccttgcgactcttagatatacacctaagagaattaaaggttatatggtagttcaacatttaaccttttgagaaactgctgaactgttttctacagcagctgtaccatccattttatgttcccaccagcaatgcataagggttccagtttctccaaattcttgccaatgcttgttattttccattaaaaaaaaaattaggccagg[131 bp omitted]tggtggcgggcgcccgtagtcccagctactcaggaggccgaggcaga[134 bp omitted]tggtggctcatgcctgtaatcccagcattttgggaggccgaggtgggcggatcgcgtgaggtcaggagttcaagagcagcctggccaacatggtgaaaccccatctctactaaaaatacaaaaattagccaggtgtggtggcaggcacctgtaattccagctactcaggaggctgaggcaggagaatcacctgaactcaggaggcagaggttgtagtgagctgagattgtggcactgcactccagcctgggcgacagagtgagactttgtcgtctcaaaaaaaaatttaattatagccatcccagtgggtgtgaagtggtacctcagcgttgtcttgatttgcatttctctaatgactaatgatgttgctgatcttttcatgggcttcttggccatctgtacatctttggagaaatatctgcacaaatgtttgcccattttttaattgagttgttcattccattgaatttttaagaggcatcttccgttaaatatgtcattgtaagcctcatttcaatttcagaaaagttaaaatataataaacacatatcttagaataataactaaggtgctatctctttatgtggcttattttaaaatgtataaatatttactttgtctgtaaaatatacatgaactggcttttagaaaattgcctcattgtggggatgataatcatcttaataaagtaggttaagttacctattaaaaattaattaacatgattgatttatgttccattacatgtaccagtatctgctccagttaagcatttactatttaaacacactgtgttcatttttggggggaagatgtaacatattaaacacagtattagatcactgcattacagggtatagtgtgaatctgaaaaaaatgaagtttttgtctcttaattttgaattctaattattacgggaatattcaaaatacactatggaaaataatgattatattttttaatgtatgcgcccctttagagtctaatttaaatcaatataggggctacgtaatgatccatgtctgtttttgtcttcgcagaacctggggtctctgttctccatccgtgttgtgggactctctgtggcctgcagctatttgtctccgaaggacagtcggcccctctgtcactgggcagttgacaggtaagggggaaggtccaggttcagtcagctaatgaaccctttcttattttaccagagtcctttgagggtatatgtcaatgagattgctcatagtatttgttattcttgatcacttacctctccagtaccagccgctatgttaggtcattgggcatgttctgtgctttgaacccgtatgtctggagaggcactattatgtccgcttcaaagatgggggggacaccaacgttctcagaggttagttaacttgatcacacttaaaaagctagttaataggcaagcctaaatttgaacccagattgatctaactaaaacccaaattcagccaggcatggtggttcacgcctgtaatcccagcacttttggaggctgaggtgggtggattgcctggggtcaggattttgagaccagtctggccaacatggtgaaaccccatctctactaaaaatacaaaaaaattagccggtcgtggtagcacgcgcctataatcctagctactcaggaggctgaggcaggggaattgcttgaaccagggagatggaggttgccgtgagccgagatcgcgccactgcactctagcctgggtgacagagcaagactccatctcaaaaaacaaaaacaaaaacaaaccaaaacacgaaattctttcaattaggtcatgctcctgaattcaacaggaatatctccctagggtatgtgaagattctacagctgattcattggtcctaaactgtaagagattgtggagtgtgcctgaggcttaaagccagtgtggctgtgtctctggtagctaccttgatagccttctggtgcgtgtgcccttgcaaagcaatccccaggtcattgcaacatctatggggcagttctactctataaacgaactgtctggcacttctctttattttcccatagacccccaggttctcagtaaggtcctctgatttcctgacttggtcagccaaattcaacctgactgagatgggcctttccccttgtaaagagaccaggaaccagggtagcaggtgagccagaaggttctgtgacctacaccccatccatatcctccttggctggcagatgcttttgctttacagagttaggaaggcaggagaagggtcatcaagggcctgtttgggtctcccagggagaggaagccccttcccacactcagtcttggagataacccaaagtggttctgtagactgccagcctgtgagctaattgtcaccagcccgtgacaagaacttgagaggaagcacttacgaatgttaaagcaatatgacagagcaatctataatatgatggatatgataatttcttttaaaaatggaacttttattttatatgtctttcctcaccccccattacttttttattatttattatttatttatttatttattcatttttgagatggagtctcgctttgtcttccaggctcaagtgcagtggcgccatctcggctccctgcaccctccgcctttctgggttcgagcgattttcctgcctcagcctccccagtagctgggattataggcacacgccatcacgcctggctaatttttgtatttttagtatagacagggtttcatcatgttggtcaggctggtctcgaactcctgacctcaagtgatccacctgcctctgcctcccaaagtggtgggattacaggtgtgagccaccgcacccggcctattatttctttttataaaagtgttggtctgcagtggtttggaaacaaaccatcaaactggtcttttaccataggtagtttgagaagcgctagaattgagtagagttctacagtaagctgaccatcctaaaggatattctcttgaggtcacacccctcctggcccgcaccttccattcactggacatcttacctcagtctggcccctgttcaccccactcccatccccaccccaccccacaatcccagtcccagccctgctggtacagctctctctggcatctaatgtgaccttacctctttcacagggctctctatttagcccttgccctgcctcttccatgcctatcccaacatctccttgttctataggaaattcttttttttctttttggtaaaatacatagaacataaaattactttttttttgagatggagtctcactctgttacctaggctggagtgcaatggtgtaatcttggctcactgcaacctccgcctcctgggttcaagcaattctcctgcctcagccttccaagtatatggtactacaggtgcgtgccaccaggcccagctaattttttgtatttttagtagagacagggtttcaccatggtagccaggatgggcttgatctcctgagctcgtgatccacccacctcagcctcccaaagtgctgggattacaggcatgagccaccacttagggccaaaattacattttaaccacttgaaagtgtacagttcagtgggattgttacatttaccttgttatacatccattgccaccatccatctccaaaaatctttcatcttgcaaaatggaaactctgtacccatcacacaatatccctccccttcctcttcctcagtctctggaaaccaccactccactgtctgtcactgtgaatttgacaactgtagatgcctcaggtaacaggaatcatagtgtttatccttttgtgtttggcttaattcactaaccaccatgttttgaaggttcacccatgttgtagcacgcattagaatttccttccttttgaaggctgaataatattccattgtatgtatacaccacctagaaatatatctcctagaattttttttgtctgcttgaaatcttcctctccctctctgggatgctcaaatattattgggtctcagcattctacccctggccctctgggttccatttatgggtgttttttatgttttgttttgtttgttttttagacagagtctcactctgtcgcccaggctggagtgcagtggcacaatctcggctcactgcaacccccgcctcctggattcaagaaattctcctgcctcagcctcccgagcagctgggactacaggtgcacactgccacccctggctaatttcttgtattttagtataaacggggtttcaccgtgttgcccaggctggttgtgaactcctgagctcaggcaatccgcctgcctctgcctcccaaagtgctgggattacagtcgtgagccaccatgcctggccccatccctgggtgatcctactcttggttctgtctactgcctttaggccaaagtctcctagatccatatctcctgcccagatttttctctggattgcagacctgcctgtcctacttaaatgcctcatagacactggtaactaaacacttgccagtctgaactcttcttgcttaaagctttccatttcccatctttgtgtttaaatggtgacaccaccatctactcaggacctcaagctaggaacctggcatcatccctgaccccttctaatctacgtgttataaaccactcggtggcctcccagtgcccacgggataaagtccacacttgtgaaggtggcctacaaggccctgcctctcccatgtggcccgtccctcactgtgctgggactttccattagagggcacacatcctgccctctactggtgagccctccacctgtgtgtccctttcccctctggttcccctggctgacttttttaagaaattcattaaatttttgggccaggcacggtggctcacgcctataatcccagcacttggggaggccaaggcgggtggatcacttgaggccagaagttcaggcccagcctggccaacatggtgaaaccgcatttctactgaaaatacaaaaattagccaggcatggtggcacacacctgtaatcccagctacttgggaggctgaggcaggagaatcgcttgaacccaggatgcggagcttgcagtgagccgagattgttccactgcactccagcctgggcaacagagcgagactctgtctcaaaaataaataaataaataaataaaataaaaaagataaaaatttcttaaagttttgtttattattcatttatttttatttctataactttcttgggtgaatgttgtcttctcacttatataatttttttttttaagattcatgggtacgagtgcaggtttttacatggatatatcatgtaacactggagtttgcatttctatataacccatcactcaaatagtgagcatagtactcaataagtagcttttcaaccctctctcccttcttccctcccccattttgcagtgctcaatatctattgttcccatctttatgtccatgtgtacccacggtttagctctcacttataaatgaggacatgtggtatttgattttctgtttctgcattcattcacttaggataatggcctccattttcatccatgttgctgcaaagaaacaggaattctttttttttttttttggctgtgtagtgttctgtggtgtacatgtaccacattttctttatccaatccaccattgatggatacccgggttgactccatggccttactattatgactagtgatgtgacaaacgtgtgagtgcaggtgtctttttgatacaatgatttattttcctttgggttgatacccaggagcagaattgctgagttgaatggtagttctatttttagttctttgagaaatcatcatacttttttccataggagttgaactaatttacattccaaccaacagtgtctaagcattctcttttctcttcatccttgccaatatctgttattttctgaccttctaataatagccatctgctgatgtgagatggtatttcactgtggctttaatttgcatttccttgatgattagtgctgttgagcagcttttaatatgtttgttggccacttatatgtcttctttggagagatgtctttcatgtcctttgcccactttttaataggattatttgtttttgttgacttaagttccttatatattctggatattagtcctttgtcagatgcatagtttgcaaaaattttctcccatcctgtaggctgcctctttattctgttgatagcttcttttgctgtgcagacctctttagtttaattaagtcccatttttcaatgtttgtttatgttgcatttgctttcgaggtctcagtcattcctctggccaagtcctgccccatctgtcctccagagcatcctggggtgtgtgtccccagacacctgagtgcatcagaatgatctctttgtatgctcctcccattagcctatcagtcccttaagggtggggattgttaggtatatacatttcttggagtagcatcgctccatacacattgaataaggccctctttctttttgtatcagagctgtggtctgggcagataatctcaccctctagtgacaatctgatttccatgtaaagaaggaagttgggtgacagccacacctctttctttctgggacctaaggagttttgtacaataaacttggagcatgaaggtaccagttttcattttccactcccatgtttaaattccagttgaaaagtagactgtggattgaggcagaaagagatgtaaattttaggtttattcataagactgattaaggatgcagcttagatgtgagtccaatttgggctttcaaatgtgtttccccagaattaaattacgtacccgcagacctctgccaaggcagatctccccaatggcaggtctccctcattgtggaaatggagaatttgggggacctaaagaaagaagcttagatctaggggtcctcagtctgtctcctcagaatggaatatttgtcacatacttccagtcttccacctgcaaggcagagctgcttccaggaaacgcaaggcatgggtgggggagaatggcaggtggctagcttgtaggacataggtaggcctaatgacaggacgtagagcccaccttcttctacaatcccaccaatcagataaggtgcttctcctcctttggaaggagtgaggatgaggaggcagcatggttctccccgtctacaggaaattgagggagcaatcagtgtttttcccaatgcatcagggctccctgggctgggagaacttctcccagacacgccttgttcctcactccctcctggctcacgcaggaaggtgccacaactccagctcagacctgtccatgctcagccacaggactttgtgccttccatgagctcaaaaccttttatcagatcatcttagtggtagtttgggactcatctgacatccccccttttcttgcaacacatttgaaacactcctttgggtgtggacgttgccatcacttgtatctgttcctattgatttcaggataaaacctcatgtgctccactttgctctcttcccatctcttctgtattgaggctgatccaccgtttctgaaatgggctgggcccaagtagttggaaagagctacaggttgacaggcactgggattttctatgcactggagggtgtggaaggagaagacttcttaggttgtggaggggggcttaaaggtgctccttctgcattgcagttgggggaaaggtagcagctctctttgggcatcatcagtattgggtatttgtgtaggatggtcaagtggaagtgccctatagacattgagaaggtagctggggctgcagtggaacagctgatctatttcctcaaagtaaccccaaatctacagagctcacaagctcccatgggaatgaggggaggcactgtgaggttggtctgaagttctgagacggagccttcagcagacttagcagcctccgaggatagctgaccttggcttactggcagttttgggtatttctgtttggaacatcagtccttgggttgtgggggagactgctgagccctgaagagctgtgggaaggaggccccgtgttttctgatgggctcccttgttctcttctcagggttttgcatctcaggaggccaggaggccctccacatgtcaagctggcggtggagtgggatagctctgtcaaggagcggtgagttcaagggaatttgccacctgcagagctgagacagggcctgtgtgtgcccaggtttccctggacgcagcttcccccagcacggctgcaggcagggtgcacacatctttgagccagtgtaacccgttcctgtgagatgcctgagtgagaattttctgtatgtaaataacagtgacaggaatggaggaatggagtgatggtggtggtggtgggtgatgtcagaagtagtaactgcagtcatagtagacagttacgtagcacccacccactcaccccatgccagtcactgctctgcacacttcatgtgtgtataggggatttatttaatcttaatcacaccctatgtgtgggtggtctggggtggatactcctgtaatccacatttctcagaggtggaaactgaggcacagagagggtaagcagttgctggagggcacacagcttgtacattggcagagctgggatttgaacccagaccctctgactggagtccatgctcctcatcaccatacttggctacctctgtaacactgagggcatcagccttactttaagaaaggatgtcgttcagtccagcaagtatttattgatcaacttctaggtgccaggccctgtgctaggatgaggaaaacaaagatgaataagccaaggacctgccctgtaggagctggtgggggagagagaattccagtaaaatatagtgctgagtcagaaggatgcctgcagctctccaggaacccataggcagggcacggtagtgtggcctggccaatgtctgctgacgggtttgctgtgagtagagacatagacgaaacctgtctgggagcaggaaagtcctgaacgccgtgggtgtcctctccgtgcagcctgttcgggagcctccaggaggagcgagcgcaggatgccgacagtgtgtggcagcagcagcaggcgcatcagcagcacagctgtaccttggatgaatgttttcagttctacaccaaggaggagcaggtcccgccctgggggtccatgccccggccgggaagggggctggctgcctttggtgggttggccacgtgctgcgggggcctcacagtccgggtggtttgctttccagctggcccaggatgacgcctggaagtgtcctcactgccaagtcctgcagcaggggatggtgaagctgagtttgtggacgctgcctgacatcctcatcatccacctcaaaaggttctgccaggtgggcgagagaagaaacaagctctccacgctggtgaagtttccgctctctggactcaacatggctccccatgtggcccagagaagcaccagccctgaggcaggactgggcccctggccttcctggaagcagccggactgcctgcccaccagttacccgctggacttcctgtacgacctgtatgccgtctgcaaccaccatggcaacctgcaaggtgggcattacacaggtgagccttgccttgcctttctgcaaatgcagctgtggccacagcctcgagatgtccctggaatgggtgttgctcagatgctgagctccctggggcacttattgagatccgacccctcacccaccgcacaccaggaagatgaggatgaggaaaacaaagatgaataagccaaggacctgccctgtaggagctggtgggggagagagaattccagtaaaatatagtgctgagtcagaaggatgcctgcagctctccaggaacccataggcagggcacggtagtgtggctgtctcgcaccatgtgcgagagcagaagggaccttgtcccagctatagagttgacattgagttaggttggaggttggaatatgtaaagttaggcctgatgcagtagctcatgcctgtaatcccagcactttgggaggctgaggtggaagaatcacttgaggccaggggttcaagaccagcctaggcaacaaagtgagacccccgtctctacaaaaaaaatgaaaaaaaaaaatgagctaggcattgtggcttacacttgtagtcctagttgctcaggaggctgagataggaggctgaggccgtggtgaaccatgattgcaccactgtactccagcctgggcaacagagcgagaccgtgtctccaaaacaaataaaccaacaaacagaggttagttactgcccaaattttcaaccatattaaatatgggaggtcattattggaaccaagagagtgacattcattctcatctgtgattcagcgtgaggaatcttacttatcggatttggtatccttttattctatggggtacttttcatgtttattcctctggggaatttcagagcagtggatgaagggaagggcataaacaaatggccagattttctcaatcgttcataatcatccctttgagtgttttcagagagtgtcatgagggatgatttttctcgattatgtcattgtttgcttctcccccaccagggcctctcagtgacggtgagaagcctattggtagctgcggcaattgagtgtctccaccgtgcagatagtgtggagggtcatcggggtgagccttaggagtccagggggtttagggcatgatttccgccatcggagaatggatggaacaggcccccatagagaaagagaaatgaggatgcagttacaggctggggaccacctgagtggacagagatgcgctggatggtgggccagcctaggctggtcatggtgaaggttatgggagccaccaaagccgctttcagctgacagtggccgccttatgctgctgtgcggtgccagcctgttcttccacagctgtcctgctccagatgagggcttgccacctttgtaactgctgggaccattctgtccagccacttcccctgtctcacttctctgggccgaaaatagctcagcaggaatcccttgaggcccatatatatattgggaggcatctttgttactcagatttttttttttttttactaagagcgttatggctgaatgagtccccgtgcacacatgagtggtgaaaataaggacagctggaacctgggccttgtcatttcccatgctgaacgtgctgcctccccatctataaactcacagggtggccccacataaattaagggcagtgatgtaaaaccacagcagggagttagaagtagcataggcgtgagaagcgttggcatctgccttatcaaaagcgagatccagacccctcctggggtgaacattaaagagcagaatgcccgattttgggggtggtggtatggcagcagaagggacgcagttcctggaaggttccccttgcagagatctcctgggtcagtgtttgcacacacagtgtgccaccacctgccaggaaagagcctgtttaatactaaaagcaaagggagaggagcccaagggaaagaggggactggcgaggcggtaggcagggcagtgtgtgcagccaacacagccctgggtaagacctgggccacttgctgtcatcggtgccaacatacacaatcttttccctgaagacaatttgcactgccagttaaatggcagagtctgggcttcaaacctgggccaccctggctccagggtcagtagcttctgccctgccgagatgagtgattcctgatatgaacaagtccccaagccatgtagggtattgtagatgagtgtcaactccctcctttaggtgaagctcaccctcagtggcttcctaggaaagggtgatgggagcttgacctttggagtgcttacgtgtcaggaaatgcctttatttccacacctgattgatagcctggtgggacataaagtccttgattgaaaatcagcaatgttgctccgtgtggaatggggtctggagtagggttttgctgttgagaatgggtcaggccagtttgatttctgttcctttgtctaggataggatatatttttctctctggaagctttcaggttctttttcacaggtgctctggaatttcatagagtgtgcttacctgtaggtctttttcattgcttgtattgggacctgcatttaggggacctgtgtgtctgcagacgtgatcttcaggtctgggaaatatctttgtgcttttttttgttttgtttgtgagatggaatcttgctctgtcacccaggctagagtgcagtgatgtgatctcggctcactgcaatctctgcctcctggattcaagtgattctcctgccccagcctcctgagtacttgggactcagggctggccacggtggtgctcgccaccacgcctggctaatttttgtattttttagtagagacagggtttca[141 bp omitted]ttgggtcctcacctggcttggcttcttgtggtttctgacacgcccagtaccgagcctctggggctgtagctggtgggtggccctcttcctaccccctgcaacccccccacctcccccaggcactctgtgttgaaccccttccttgcagaggcgagtgtgtgacctccactccatctgcttgctgggccctcaaagctgagctgttgctttctatctcacgtcttttgacatatttgttcctttttagttatttgcttcttggaagtgtgataattctaccacatttcagatttttagaaatctcaaatgccttttgtttcattttaaatgtggtaatgtggtaaaatttcattttaaatataggtaatgcatgcctatatttcaaaattcacacggcctaaaaaagatggacagtgacaagtcttgattctatgtttgttcctcatctaccccctcctcatttctaggtaaccatttttagtagtttcttgtgtactattcttccacaatttctttatgtaaatacaagcaattgtgagtatatttttctatatacatatatatgtgttgattttatatatttccttcccaccccctaatttaagtaaaagtactatttactgtgttgcacctggcttttttttttttttctctctgaaaatctgtcttggaaatcttttcatgtcctcatttctagacagcttctccatcttcttttataaatgtaaatgcactaaataaatataacaatttattaaatactctgtagatggacat[137 bp omitted]catggtgaaaccctgtctctactaaaaatacaaaaatcagccaggcgtggtggcgtgtgcctgtagttccagctactcggggggctgaggcaggagaactgcttgaacccagaggtggagattgcagtgagccgagatcacaccactgcactccagcctgggtgagagagtgagactctgtctcaaaaaaaaaaaacaacaacaacagcaaaaaaaaaacccaaaaaacaaaaaaacacaaatattgctgtgataaccctttagatatgtcattttctacatatggaagtttattggcaggataaattctcagaattggaatagctgtgtctgtgttgtaataagcacaaacaagatgtcctgcacaaagggtcatagcagtttgcactctgttaagagcaagagaacacctggttctctatagcctctccagtagagtgtgtgatcacacttttggatttttgcccatctaatagtaggaaaatggtatctcagtgtaagttgaatatttaggttcttaatagtgtgagcttgagcatcttttcgcatgtttgagccactatggttcctttcctgtgaactgtctatccatatccttgactgtttttcaaatgaattattagtctttttcccatcaatttctagatgctctaattcttaatgtactatgagattcacctcttttctgtaatataaattgcaagtatgtgttccctgtgtaacatctgtcagttggctcttcctgtggaaaatttttgccatgcagaaagtttttatttttgcttttctaggtaaaattatcaatcatttcttttaagtcttctggattatgagtcatgattagaaagcctttttcactctaagattaaaaagtgtttttcttgagttttctacttggttttagcttattacatttaaatccttgatttggagtttcttaattttcttgagagaaagagatccaactttatcctccgggagttgccaatttgtcccgagatcactactgatggaaaa[145 bp omitted]ctcccgggttctagtgattctcctgcctc[217 bp omitted]tgcttctcatattgtaggccccaacaattggtaactttcaagctgccatatacttttacataaatgctatcataccatagatgtattttttgtttttagtggatttttgtttgccattttacatatcaaaataaacttaaaagatgttaaatgaaataaaatatgatgatgaggcacttgactaaatggcaaaatgaaacactgggttccatcatgacctcctgatgtgcgcatccatttacgtacgcgcacatgtgtgtttatgtgtacatacatagattaagactaaacagaatttcatgagtcgataattaaatttactacatgtgatataccttggtccat[144 bp omitted]aaaccccgtctctaataaaaatacaaaacaattagccgggtgtggtggcaggcgcctgtagtcccaactactcgggaggctgaggcaggagaatggcgtgaacccgggaggtggagcttgcagtgagccgagatcatgccactgcactccagcctgggcgacagaccgagactctgtctcaaaaaaaaaaaaaaaagctttaaaatatttcattttttatttattaaacatttttttttaatgcactgattaccagtgtcccgatgggctgatgactggcaatttggaagacaccaaactatatagaaatccaggatctttgctcattaattcattgcacaaatgtatattaagtacctgttctatgccaggtcctggagcttcagtgatgaacaagacaaatacaaggcctgccctcatgggacttcagtctcactttggagacagacaataaaatgtgcttatcattttagcactttcactacctgacattttgaaagggcgactgattgactgtgtctgtgatagacataaggcctctgcaaggatgtcacatgtaggctcagagctgaggatgagatagaactagctatgtgaataatgggatgaattgcattatgagcagagctcgtagcatgtgcaaaggccctgaggcagaaagcattcggtgtgtttaagacatgatgacagcctggatgaagtgtagccattcaggggtaattgatgaagggtggggctggagaagtgggcaggacactctaggccacggatgggagtttgcattttttccaaaggggtgataaatcatttaaaggttctaagcagaggagtgaagacataatctagtgtacaaatcaaactagttgctctgctgtatggagaatgtgtagaagggatctagagtggaagctggaattccagttaggagggtgcttcaggggccgagtgagagacaccactggctgagatgttggtgttgacaatcaagatattcgagacatagtttggaagtagaatcagtaggtctggcttttggattaggtgtggggcggaacggaaaagcaagagcaaagatgaactcctaggtggctggcttggattagtgtggaggtcagcaaactgtggcccacgggccggatccaatctagggcctgttttttgttgttgttgttgttttttgagacggagtctcactgtgttgcccgggttggagtgcagtggcgtgatcctggctcactgcaacctctgcctcctgggttcaagcgattatcctgcctcagcctcccaagtagctgggattacaggcgtgcaccactacgcccagctaattttttgtatttttaatagagacggggtttcaccatgttggccaggttggtctcgaactcctgacctcgtgatttgcccacctcggcctcccaaagtgctgggattaaaggcatgaaccaccacgcccggcctgttttttttcccccgtttattaataatctatgggttaaaaatggtttttacaattttaaaagtgggagaaagacacgcagaatatgcgacagagaatatatgtggccatatgtgacctgcaaagtctcaatatttgtcatctggtcccttatgggaaaagtttgcaaacttccagattactgggttatgctgtcatttgctgacacgtagagggcaaggaaacggatattttgttgtcgttacttgagaaatggtgagaatatttatgaattttccttagacgtttgacttcagttcttagaaagaggtatgccataagcccaattgtgattctcatcttcacttttattgcatgcttaatcagagatatgcattttgaagcttctcagaagaaatggggtgaacgctgacattattgtttggctacctaacttgggagctcccttttatttgagattttgcctgatgaaggggtagaatattcaacttaaaataacagcactcttggccgggcatggtggctcaggcctgtaatcccagcactttgggaagccgaggtgggtggatcatcttaggtcaggagttcgagaccagcctggtcaacatggtgaaaccccatctctaataaaaatataaatattagccgggtgtggtggcaggcaactgtaatcctagctacccaggaggctgaggcaggagaatcactggaacccggggggtggaggttgccgtgagccgagatcgcgccacttcactccagcctgggtgacagagcgaaactccgtctcaaaaataaataaaaataaataaataaataaaaataataacagcacttgttatagtaagaatccgagggtataacttactgatcttttctgattccaaaaaaaattcatttctggccaaaaatggactgtttttttctcattctggtttaaacataccgctttttcagctatgccagtgggaaatgtcttcctaccttttggggctccaataactcagacttggggatgggacctttgcagcctactgccggaactctctggatggccagtggtacagttatgatgacagcacggtggaaccgcttcgagaagatgaggtcaacaccagaggggcttatatcctgttctatcagaagcggaacagcatccctccctggtcagccagcagctccatgagaggtaggtgctgctgctcatgacaggaggggggtgtggggaagtcactttaagaactgggaagaggctcagttgaacatcgaggaccaggagaggttggcaaggatctgaaagaggaagcccgggatgctgctgtagaaacctgagctgcatagactggttgctcatttaccagggtgtgggatggatggattataattcaggaaaggggaaaagaataattgtttgtattcagggcaggcgatgcttggcagtgtggtattccatattcctagtctcactcatatcacagcaggttttttgaggtgtatgtaatgtaaactgatgtcagtcctgttggaaaggcagggcagttataaaggatgcaggacttttctaggaaaggtagctttttttttttttttttttttttgagatggagtctcgctctgtcaccaggctggagtgcagtggcatgatcttggctcactgcaacctctgcctcttgggttcaagcgattctcctgcctcagcctcccgagtagctgggagtacaggcacgtgccaccaccatgcccagctaatttttgtatttttagcagagacggggtttcaccatgttggccaggaggatggtctcgatctcttgacctcttgatccacccatctcagcctctctaaggtagctgtttaaacactgctgcactcaagcaattcatttattagcctcaaacttgcttggaagtctagagaaagaaagtgccaaagctgaccctttcacgtgatttgtttcatgctgcaaaccaactgtccttatctttgggacaagagagcattaaaaaaaaaaattaagcagattttctcctaacagttatcagaaaatggccaaataaatccaagagtcctcagcaggtctaaaccaatcctaacataagtctagcttccatttatagaagaagatgttgaaaaaagaatgaaaaacctgtcctattagagaaaagaagtttttcttactgtccagtataataaagataatgtatctttatggtgcaaagtgtaggcatccttaatgcccactgtaaaagatttggtttccctaaacttgggataaactcctgtaacatggcttattacctgttgaactgtgcatgctggggccctggtactggtaataaaatactgttactctgcctctgactacagctctgagtaatacagtactttggctctggaaaaagaaacaaaaaacatatttagaatgccaaagctggtgataagtaatttcatggaaagcatttcaaaacttgtcaacatactttcctttgttgttgttgttgttttgttttttattttttgagacggagtttcgctcttgttgcccaggctggagtacagtagcgcgatttcggctcactgcaacctccgcctcccaggttcacacaattctcctgcctcagcctcctgagtaactaggatttacaggcgcccaccaccacgcccagctaattttttgtatttttagtagagatgggatttcaccacgttggtcaggctggtcttgaactcctgacctcaggtgatctgctcgcctcggcctccgtaagtgctggcattacaggcgtgagccaccgcgcccagcccatgctttcctttttgtgctcaaatgcctctccctaaacttttaagcttagtcacatgggaaacccgatcacaggtttcccctctccttgttgacaggtttctgcagttctgttctggttctgtagttctggggctgaaggatggggccggaatggggatctggttgtgagatgctccgctaggactctgaagtgctggggttgggctcagcctccctctctgtgtttcctccacaggctctaccagctcctccctgtctgatcactggctcttacggctcgggagccacgctggcagcacaaggggaagcctgctgtcctggagctctgccccctgcccctccctgccccaggttcctgactctcccatcttcaccaacagcctctgcaatcaggaaaagggtatgttggttaaatgtgcttggttgattttcattttctgtaatgtctgttgttattgctcagtatgaaagcgctgtcacttcgtagtcttgaatggaaagggtccatcattacgagaggtttgttcatctcttaaatggggtcttctatgacctgcccttccttgcccgcttctccccatcctctaccctccagccacaggtaccttttctctgcccccgtgtagcttattgtcataagcaagtaaacctgggaacatggtacttaaagaagggagaatggcaaagagaatcagggaagagggtattcaggcccggggtggaggagggagggtgcacagggcccgggagataggacgggcgggtaacatctttctagggggtgacactgagcagagctctgagtgagagagagtgacttgtgtagaagcctagggctatgttccaggagaggagccctccagggtgaaggctgggagtgagcattggatgtgtgaggggcagaagaaaccagagctgtggctggagcagagacacccaggagtagagagagcaggagtggacaggggccatgttagaacctacctttctgagctagaggtataaagtttggactctattctaagtgtagtggatagcgagtggagaggtgtttttgtttgtttgtttgtttgtttgtttgttaatgcttctgctttaatcattgtttttaaaaaattgacacataataattgtacatatatttggggtacatatgatagtttgatacatgcgtacaatgtgttcattacatacaaactagggtatttagaatatacatcacctcaaacatttatcatttctttgtgacgggaacatttcaaatctctctagctgttttgaaatatacaatatattgttggtaactgtagtcaccttcctgtgctattaaacatgagaacttattttatctaactgtatatttgtactttttttttgagacagagtctcactctgtcgcaggctggagtccagtggcatgatctcggctcactgcaacctctgcctcccgggttcgagcaatactccttcctcagcctctagagtagctgggattacaggcgcctgccactacgcctggctaatttttgtacttttcgtagagacagggtttc[132 bp omitted]atctgcccccattcccggcctctggcaaccatcattctactccctacctccataaaatcaacttttttagcttagagttttgagcagggaagtggttgatctgatttatagtttgtagagagtctactctggctactgtgtggagaagacatcacagggggcaagagtggggacgtaggaagatcattcaggagactaacatggttatatccaggtgggagacagtggtggtttgaactagcatgttagataagagatggtcaaactggatgtatactgaagctggagctgctaagatttgctgatgtggggtgtgcagtgtgaaggaaagagaatagtcaaggatgactccttgcttaaggtctaaataacgaggggaattgctgcacagttaatgaggtgggagaaagttgggtaggaacactccattctggagggaagtcaagaattttttgacacagtaattttgaaaatcctgtaagacaccattccccaggctttttggcaccagggaccggtttcatggaagacaatttttacacacacttgaggtgaggatggtttgggatgaaactgttccacctcagatcatcaggcatgagattctcataaggagcatgcaacctacatccctcacgtgcagagttcacaataggctttgtgttcctatgagaatctaatacgcctgctgatctgacaggaggcggagctcaggcggtaatgcgagtgatggggagcagctgtaaatacagatgaagcttcgctcatttgctcaccactcacttcctgctctgtggcccgattcctaacaggctgtggatcagtacttgtccacagcccaggggttgggggaccctgctaagacatcacatcaatgtgataactggggagtggagagaaatatttgagagtcatcagcacatggatggaacagtgctggctg[223 bp omitted]gaggcaggggaatcgcttgaacctgggaggtggaggttgcagtgagcttagatcacaccactgcactccagcctgggcaacagagcaagactccatctcaaaaaaaaaaaaaaaaaaatgaagacccgagaccaaacctgggggctctccaacatctaagggttgagcaaaggtggagaggccaagaaaagaacggagaaggagcagccagtgaggggaagaaaaccaggtgagtgtggttgacagatgaaaaaaagagaatcttaaggaagcagccaactgtactggatgctgctgagaggctgagtaaggtgaggatgggtagattccatcaggctggaaggccaccggtgacttgccaggagcatctgccatggctggagagaagggaggcctgcctgcagcaggtggaccagaggctggggtggaggaagtggcagtgtgtacacactccagcaggcgaggtgactgaaggaaggcgggttgacagctaagtaggagatagtagagacgcattcagatgatcaggtctacagggagatgttgatgacagtgctgggaacaagggggtaaccacagaaacaaagtccttaaggctgagcgttgtcagatcacgcctggaaccctagcattttgggaggccaaggtgggaggatcgcgtgagtccaagaagttaagactagccctggcaacatagtgagaccccatctctataaaaaattagccaggcatggtggcatgtgcctgttgtcccagctactcaaaaggctgaggtgggaggatctcttgagcttgggaagttagggctgcagtgagctgtgagcacaccactgcactccggcctgggtgacagagtgagaccttgtctcaaaaaaacaaacaaaaaaaccagcattactatgtaagaactgtatgtctgtgtatgtgtgtttgtgcctgtgtgtatgtctgtgtgtgtgtctgtgtctttgtgtgtgtgtgtctctgtgtgtgtgtctgtgtgtttgtgtctttgtgtgtgtgtctctgtgagtgtatgtctgtgtgtgtgtttcttgtgtgtgtgtctctatgtgtatgtgcctgtgtgtgtgtctgtgtgtatgtgtgtgtgtctgtgtgtgtctctgtgtgtgtatgtgtgtgtgtgtgtgtgtgtctctgtaggtatgtgtctgcgtgtttgtgtctatgtgtgtgtctctgtgtgtgtgtgtctgtgtatctgtgtgtctctgtgtgtctatgtgtatgtatctgtgtatatgtgtctgtgtgtgtctctgtgtatctgtgtgtgtgtctctgtgtgtctatgtatatgtatctgtgtatatgtgtctgtgtgtgtgtttctgtgtgtctatgtgtatgtatctgtgtatatgtgtgtgtgtctgtgtttgtgtatctgtgtgtgtgtctgtgtgtgtatgtgtctgtgtatgtgagaatgtgtttgtgtgtatgagtgtgcttgtgtgtgtattgtttgtgcctgtatgtctgtgtgtgtgtgtttgtgtgtctttgtgtgagtgtgtgatctttagcctttgtgttccttcagccagaaagtggtaacatgttcaaattatttttttagttccttatttcttgttaggtcctaacttagttttttaaatacaattttaatagaaatattatatatacttgtgattagtatactttacatattgcatacaattatatatataagtatatgtaagtaaagtatattaatccttcaatacttaaagtatattaagtatacagctgacaaattttcataaaatgaacatcctcatataccagattaaaaaatagaatattctagcaccctgctgccttgtatctctctcaatcatgactgttttaaataaaaaacagcttggagatacatagttctctgcacagaaatttacttatgagagagagagcgaactgttgtctgttgacaattgtcaataaaaaagcaaacacaggggtttgaagaagagggggtgcagggtgaggtgggggaactacctcttcctttctgcaggttcattcatgggctggaatctgttgtggaggctagccttgtggtctgacctggagaaatctggcctggtcatcaaggggagcaccctgagttgttacagatttatggtttcttgagttatttatggattctccaaaaatccaatgcaagttttgtcatgaagctatctgcaatgtctgctacttgacaaatctcc[213 bp omitted]gaggcaggagaatcacttgaacccaggaaggagaatcacttgaacccaggaggtggaggttgcaatgagctaagatggtgccactgcactccagcctgggcaacagagcgagactccctctcaaaaaaaaaaaaaaaaaaagtccttacattgtcagaatagtttacatgtttacattttgtattgcggttcggtttcagagttgtttctggtttgcagccattaccagtagtcctgttatgaacatttttgatcctgtccttggtgtctgcacgtctgcatttctgttgggtgtatacttaggagtggaattgcttgggcacagtgtgtgtgtgtgtgtgtgtgtgtgtgtgtgtattcatcagctgcttatttctttatactttatgtcatcatttgtatccaagtacccaatgcaatacagcaggcctttaaaaatgtcattttgttcagcggtcattttgctataatgttgatgagaaaaaatagttgattcctggctgggactactggagaatgcagtttgctcattctccccatgtctgcgtgggttttctccgggtgctccagtttcctcccacatcctaaagatataccattaggtgatctgattgtctgcacggtctcagtgtgagtgcgagtctccctgaaatgggaggggggcctatccagggctggttcctgccattcatgatcctgagctggaataagtgggcaaataattatcttactcgttacttttgttaaatgtatgtatagctcacattttttttttttttgaggcggagtcttgttctgttgccaggctgaagtgcaatggggcgatctcagctcactgcaacctccgcctcccgggttcaagcgattctcctgcctcagactcccgagtagctgggactacaggcacgcaccaccacacccagctaatttttgtatttttagtagagatgggggttt[131 bp omitted]gtagaagtgtttgggtctttttagaagtttggcgatgcttttgggacgagaaatatgctgtaggagcttaactattatttatatcaattagtctacgggaaaattggtttagttatatgttgttttgcttcaagttcaagttcaggttattaagagcctatccgtgatgctgcaaagatttactacaccaggcatgtaccagactctggttacatatttgtgagtgaatagagatgatgataggatcttaaagctacaagtggttttagattctcattgagtccacccctctggtttacagtgatttatgtgtcagagttcagttaattccttccccagcgtgtggcatttgggctgccaaaatttcatgagtagacatgacactcatagcatgtctgtgcatcttggagttgtctgatttccttagaatacgtttctgtgagcagtggctcacacctgtaatcccagcactttgggaggccaaggtgggcagatcatctgaggtcaggagtttgagaccagcctgaccaacatagagaaactccatctctactaaaaatacaaaattagccgggcatggtggtgcatgcctgtaatcccagctactcaggaggctgaggcaggagaattgcttgaacccgggagacggaggttgtggtgagctgagatcgtgccattgcactccagtctgggcaacaagagcaaaactccgtctcaaaaaaaagaaaaagaaaaaaagaatccgtttctatgcaggcatactatttcatgcagtatgttttgttttgacttgtcctggctggacatttcttttccccttatattttcatgattgcacatttaaaatagtgtctatggctgggcaccgtggctcatgcctgtaatcccagctactcgggaggctgaggcaggagaatcacttgaacccagtaggtggaggttgcagtaagctgagctcgcaccattgcgctccagcctgggcaacaagagtgaaactccgtgtccaaaaaaaagtctctacaacaaaaaagatgttctttctcaagctcattcatccctgtcagcattgcctatgataagctcaaaagttcatcccagctctgtttaacggcaaagtacctcaggccatttctcagttctcccaaggagaaatgtgcttgatatcctcccaggaggaggcgatttcaaaggatggtccaagtttttcacatggtattcagacagatgtgaggcacagctctagaaaaactcctcagagacccctgagaggcctgggggagggatgataactgtcctgcagacccttgcaggcattttactcgcattctctaattcagtcctcaaaacccttgggagaggtgaccttatagccctaccaaggggatatctgagattcggtgtgaagcaaccagtcgcacctagttgtaaagctcacccctagaaagtggtggggctgaaatagacccgttccctctgggtgccaggtcttggctctcaggctctgtagacatacattccagattagagtcgctttcacatggagagagactgcaagagccttgcttcctaagggagctttccctcttggagtttgactaaaatagtgacagattttgaaagctgttttaga[133 bp omitted]aaaaccctgtctctactaaaaatacaaaaattagctgggcatgatggcacatgactgcgatcccagctactcaggaggctgaggctggagaatcacttgagcccaagaagtggaggttgcactgagccttgatcgcaccactgtgctccagcctgggtgacagagtgagaccctgtctcaaaaaaaaagaaagactaggaagccgaggcaggcagatcacttgaggtcaggagtttctcaatagcttggccaatgtggtgaaaccccgtctctactaaaaacgcaaaaattagttgggcatggtggtgtgtgcctgtagtcccagctacctgggaggctgagg[131 bp omitted]cagcttttttttttttttaattcttactaaacctgggcaagacaaaaatctagcatatcagttttcaaatagtggttggtaccacctctccttcccactatcatgagtttgcaaatatgtaggagagggtgttttttgttttttgagatggtgtttcactcttgttgcccaggctggagtgcagtggcgcaatctctgctcactgcaacctctgcctcccaggttcaagcaattctcctgcctcagccttccaagtagctgggattacaggcatgcaccaccacgcccggctaattttgtatttttagtagagacagggtttctctgtgttggtcaggctggtcttgaactcccgacctcaggtgatctgcccacctcggcctcccacagtgctgggattacaggtgtgagccaccacgcccagccgggtttttttgacggtcaaaattaatagaggtgactactggcatttattccccgggtggggcgcaaggatgctaagtgtcctgcaatgcccaggagcagccccgctcagtaaaaagtcaccactgcaaagtgccagcagctctctgtatagaaatgctgacagcttgagaacaccacctttccggtagccctggttatgatcatcataataatgaaggaatcttaaaccaaaatgaacggatccaagtgttttggagactgcaacttatataattgaggtgggtgtgggggaaggttccagaagaaaaagaatattacaacatcttacttttgcaatttttatacaaccatgaccatgtaaaaaaaaatggctaggagtccttcccagagaccccttggtaataaggtgccctgaaagttaagctttcacagcttctcagtatgggcgcttctgatgataagtttcctctatggcttttattgggcctcaaaggttttgtttttctctttttcagcactttccagatagtatttcatttcggttttgatttcttctttgatctagaagttatctggaagtctcaactctttcagattattttggtcaactttcttctttgatttttgtggattgtgatccaagaatgtggttttcaaaaattattccctttatggagtcagacgtgctaccattgcgccacaaggtcacacattagtccctttttgtggtcaagtacatgattactattttgtaaatgctctgtgcatgtataaactaatgtatattgtctatttgagggatgtgagctttatatcataactattaaattaggtgagttcattggctattcaagtcccctatgtctttaaatgtaccttctctgggactcctggcaggaaggaaatataatgaaaccttcctgtatagctgtattttttttttttttttttttgagaccgagtttcgctcttgttgcccaggctggagtgcaatggtgtgatctcggctcgctgcaacctccacctcccaggttcaagtgattgtcctgcctcagcctccccagtagctgggattacaggtgacaggtgcccgccaccacacccagctaatttttttttttttttgtatttttagtacagatagggtttcatcatgttggccaagctggtctcaaactcctcaggtgatccacctgcctcagcctcccacaatgctgggattacaggcgtgagccactgcgcccagcctagctgtacctttaatcaagtaatccttgcattttaataattttcgctttatcttgttagctgctttgttactaggtgtctacgggtttatgactgttagatctcttttataaattgtgctttttattattataatgtggctctttatccctgcttaatgttttcaaccttaaattctactttgtccaagtttaataatcccacccttttcttctttctttttgccttctctctttcgcatttgcctgctatcattttgcccctctcttgggctttaggcacctttccttttgagttagttttaagtggtttctggtaaacagcctggtgttgggttttttgttttctttttaccaaaaattcagaggccgtcttataattggagccttcagtccatgccgatgtaatgtaacagctgcgaaacttgattttgttcatttcgtttttaaagattttatatgactgtttcttcttttcctttccttattgttgctgatgcgagcgagtcgcgctttgtttcctggttcattgggaagttttgccgctcaggtcacaaagtagcaatttgttaattgctactttctctatcccagtatttagaagccagttatttcctgcaaggtgctctctttcaccactgtcttctctccttcctccaatcagatgagaaatatataacacatctgttgtcactcttttccctgtcattccccccaaaatgagagctttgaaagactttcatgtgccccttctggtctcttttgcaaactcttagattttgctgacagggcctagtactttctattccagacttatcaaaattcccctcgcagcacttagctttatgtgacacattctgagccgtctgtcctgcatgtagggtggtggacagtacatggattgcagtgtccactgtgcaccactatttttctcctctttgtcaccccccatcttgaggtggtgggtctggttcattcgagtgtgtgtgatacgttctcaaaatctttgcccagccacaaatatttcctttcacttgggagtgaatggcagcttggctggttgcacgactcttgagtcgcagtccttttctctcaggcatctgaagctgttttcccacagcctcccaggccccagggttgcaggtgagaagcccaggctttttttgtttacaggagagtcacttgtttttttctggtgggaagcttttaagatgctccccttgaccttggagtttagaaattctcccagaatatgcctaggtgcgggtttttgttcttcaaccttacctagaacttgggggtgccttttgttctacagactcaggcctgtctttagagaaatgtcttttggtttttgtttaatgattgtctctcctgcttttgacgtttttgtgatttgctgttgagtctcctggatctatcttctgagtctcctgccttttcccttgtagtttcttgctcttctcttttcccttcccttcctttcccttcccctcccctcccctcccctcccctcccctcccctcccctccctcccttttttttcttttcttttctttttttttttgagatggagtttcgctctgtggcccaggctggagtgcagtggtacgatcttggctcactgcaacctccccttcccaggttcaagtgattttcctgcctcagcctcacgaacagctgggattacaggtgcgcaccaccacacctggctaatttttgtatttttagtagagacggggttttgtatttttagtaga[156 bp omitted]ccctgttttttcattatcttccttgagatgcaagtttgttgatcattttaagctgtcacgtttcatctgtttcatcagcagcctgctctgatggttctggtgattattcttctctgaccgccagaccccctcatgcgtgttgctgttttcttttctgtcccaccctctcatgtatggcagtggctcttggagtgatgaaaagggcagcagctttggctcccaggggctggtggtgtgacagccagcctttttcttccccgcttcgtcctgctggttcagtcttggagatggagaagcttcaactcatcggtgtagctttttcttaccttaacggggaccagaggaaagttggggggtaggcttgtcccaggttgcactctgacctccacgtggaaatggtcatcagg[131 bp omitted]ggccaacgtggtgaaacccagtctctgctaaaaatacaaaaattagccgggcgtggtggtggacgcctgtaatcccagctactggggaggctgaggcaggagaatcacttgaatccgggaggtggaggttgcagtgagccgagatcacaccactggactgcagcctgggggacaagagcgagactctgtctcaagaaagaaagaaaagaaaagaagcattgtatggtatcatgtattcttgcttttgccaaacctcataaagacaggtgcaccatattctttttccttcaactgtatcccaagcgttgaagacagtccttggcacatggcatgtgcttattaaatattttttgaaggagtaagcgggtagatgtatgaagcacgatggaagcccttgaagagacagaaggtgctcaactaggaaaagtcttgttctgtggcggggggcaggggggcactaagcatggcaccaagaggtccccagccctgttcacaaaacacctgagtatggattgatgcatacttcattggccaaaaataaaaaagtcatgtagaaatcaaggtggccacacagggacaggaacagatgtggccgttctcaaagcagcatctgctggctccagagctgcggtgtggagggggtgtcaggggactgagcctgtcagctgcactggtgccatctgcatggagggggctcttgtggggtccaaaaagcacattatgaatgctgtggggctttataaccttcaggaagaacctaacggcctgtgtctttaatgcagtgtaaggctctaggctcagactggctggaaacagaatcttctcggggtggggtggggcgggagttgaaccagagttagtgcccaggggtctctgaacaccactgtgttcagcatctgtctcccagcatcccagaagttttgcccatctccccgggggaggggtaccaggacttgcacccaccctagacgggaagtgactttgtagagaggaagtgtgatgtgagcgtgggggcctcttattcccttctgttcttatgctgcttatttctcaattttattaaagccatcactgtctcagatcctgttatcctagcccaataaatggaaggagaataaagataacaggggtactttttcactgccatctcgagaaagaggagacacgagttccgtgggcatctgtggttcccatgaaatgtagctcaggcgttgatgtcagccctggcctcagagactttcctaccaggaagaaaggaagaactgctatttcgggcagctgccaactcctctcgccacctgccggggctccaggcaacatgctctcattttgaaaggctaaaagtcacagctttgtcctactaatacaaagcgtccctttctgcccttcccagggctgtggaagagaaaaaaagaaataaacttcacacacatctcagaccccagaacatttcttccccaccccccgagggctgggaatttaataaggtcaatctaaaccaaaattacagagtattttgggtaaaattgtgtctatgactggctaatctaaagaaatgctttgaggaaagaaaaaatcaaacattctttatgagaaacctggaaagtcacatccttgagatgctttctaactccttttggaggtcatgggctttcggcttcttcctgctccagccatttctccaggggtgcttggtcgatgtgcactttgcctcccccgcgttcctgcagcattcactcccctgcacctcattcttttgcctttcctgagctctcacccgtgcacctgacaatctctggcccttctctgtgtcacacatcgtgttggctgtgccgctgacagggggctttttatggcaggagttctgctcccttttggagcttctctgtttcattgttcattcaggctgttagaacagaataccacgcctgggcagcttatccacaacagacatttcttccccacagtcctgcaggctggaagtctgagatcagggtgccagcatgatggggccctggagaggttcttcccggctgcagacagcttcatgtgtcctcacatggcaggaagagagctgggtagctcttcaacctcttcttagaaggtcactaatcccattcacgagggctctaccctcaagacctaattaccacccagcagcatcacccccttaaaccatcgccttggggactagagcttcaatgtatgaatctcaggggacacaaaccttcagtccatagcaccctcaaacactatgatgaagtggcacagtgagagtggccacccgtggggcagacttcagaggtcaccctgcaacctttctccaaatgtgtgtgactgtccttgcgccatgtaggttgtgtgtttcagttgcgccaggtggattgtgtgttttagctgaagatttctttctcaatgattgcagacatcatgtaaaacaaggcattttaatggtacagtgactgatgactgagaatttctttctttttttttttggagatggagtcttgctctgtcacccaggctggagtgcagtggcatgatctcagctcactgcaacctccacctccacctcccgggttcaagtgattctcctgcctcagcctcctgagtagctgggattataggcatgtgccaccacgcccagctaatttttgtattttagtagagatggggtttcaccatgttggtcaggctggtctcgaactcctgaccttgtgacccacctgcctcagcctcccaagactgagaatttcttaagcaaaaatacacaaccttggttgtacatatgttccttttagaaatgtggagatataggaaagaattaagaaaaaaaatccatcacaaacagcactgccatggccctatccacaccttgtttttggcatctatttctctattcttatttgtatgttttcacatgcatgcataatacatgcacgtgtatatatttttacaagttgtataggttggtgcaaaagtaattgtggttttcaccatatttttttaattccattttttttttcttttttagcccagggtaggatatctgagattcttgcatttgaaaggtacaaggacctaatatgacctagaaaagcaggaacttttgctgggcattccgtttcataggaatatttaaagatagatgaaactgatgttcattcttaaggctagatgcccgtgagactgagctttgccaggtgtctgtgctgcccggcatgtagataccttctttggcactggcttaccctgtggcttcaaacgtgtaagtggatattgaggaagagtgggtgaaaccgttgctgttccccaaaggcaggaaccctatgtggcttcttcactgctgtgtctccagtgcccagcacagtgcctcccacatcagaggtgctcagtgaacgttagatgactggcatttcagctgtagggtggcttgtacactgacagtctctctgtctctttcaggagggttggagcccaggcgtttggtacggggcgtgaaaggcagaagcattagcatgaaggcacccaccacttcccgagccaagcagggaccattcaagaccatgcctctgcggtggtcctttggatccaaggagaaaccaccaggtgcctccgtcgagttggtggagtacttggaatccagacgaagacctcggtccacgagccagtccattgtgtcgctgttgacgggcactgcgggtgaggatgagaagtcagcatcgccgaggtccaacgtcgcccttcctgctaacagcgaagatggtgggcgggccattgaaagaggtccagccggggtgccctgtccctcggctcaacccaaccactgtctggcccctggaaactcagatggtccaaacacagcaaggaaactcaaggaaaatgcagggcaggacatcaagcttcccagaaagtttgacctgcctctcactgtgatgccttcagtggagcatgagaaaccagctcgaccggagggccagaaggccatgaactggaaggagagcttccagatgggaagcaaaagcagcccaccctccccctatatgggattctctggaaacagcaaagacagtcgccgaggcacctctgagctagacagacccctgcaggggacactcacccttctgaggtccgtgtttcggaagaaggagaacaggaggaatgagagggcagaggtctctccacaggtgccccccgtctccctggtgagtggcgggctgagccctgccatggacgggcaggctccaggctcacctcctgccctcaggatcccagagggcctggccaggggcctgggcagccggctcgagagggatgtctggtcagcccccagctctctccgcctccctcgtaaagccagcagggccccgagaggcagtgcactgggcatgtcacaaaggactgttccaggggagcaggcttcttatggcacctttcagagagtcaaatatcacactctttctttaggtcgaaagaaaaccttaccggagtccagcttttgatggagcgtgtcagtattgtgtgacgctggcattcttgggactttgccaagcaactgtaggcagctcatgttgagaatgggtttccaggaaacccgttgtcttgtaatctctaaaaaaaaatttttttttttttgtggtggggggtctccatatctagacttccaacacccaaggtccatataacccaaggtcgaaaaccttcctgcatcattgggtgctttgctacagtttggccactagaggatgctattgggtcagtattaccagtttcagggcaagaactgatatttactaaagagttttggatgtgggcaaacaagatgaggctggtttaataagaatcttcaatgtcatgtcaaatactgtcaatggcttttcctttttctttcttttttttttttaaattgtggacttaaagaaaaatattttatttttaatgcttttctgggataagcattaaagatgccaaaaagaaaaaaaaaacaaaagaatgatagtgatggtaaggcaagattctagcaaagagagatgggagataaatggctgagagttcaggtgaatatttaatatattaaaaattgtattaaagtttttcaaggtattttaaaaataactattttgatactagaaaaaaagtccattttttaatttaaatatgagatctatgtacaattttaataaaatcctgtccatgaaacacgcatggctgtctgaattattcaagtctgataaatgatcttgtttcatttctgctgagtaaacttggttcgttgctattgctatcagaaagtagttacttgagttctttctaaaatctaaaagtgcttttcgttccaatgacttgctgttttctaaagaagtggaagcctcctcaggccattctccggagggcttgtacttgaaaagacgtgagttccacatctgcctgacagactcttagttgactgtcccgtttcctaaagctctgcacactcttcagtagcgactcttacaaatatcctatcatttcttacttagaagctgctaagcctgaccccaggcctggggctcaacagttgaggtcacctgtacttaaacagtccttcttctgcaaatacttccttttttgacgggaaacatttgttctcaaaaaaaaaaaagaaaaaaaaaaagacacctgatcccaagaattaagtcttccttcatacatatagcatgactcattgacatgtctctgctacattttttttctcttaagaaggagaatgggctgggcatggtggctcatgcctgtaatcctagcactttggcaggcggaggaaggcagatcacctgaggtcaggagtttgagaccagcctggccaacatggcgaaaccctgctctactaaaaataacaaaaattagctggacgtggtggtgtgcacctgtaatctcagctactcgggaggctgaggcagcagaattgcttgaacccaggaggcggaggttgcagcaagccgagatcgagccattgcactccagcctgggcgacagactggattccatctcaaaaaaaaaaaaaaaaaaaacgaggaatggagtccattttttaccccagtgaaaaagacaacttgcctttgatcagagcaacagttagaaggtagaactgagataacagagaaaggaagaagacccagccacctgaccccagaggacaatatgtataccagtaaacctgtgtgtttgcattgcaaaagaagtccatgttctcttcaagtcttacactgatgtacgcgtaggcactgtggaagacatggttgtccaagtcctcttgggtaaataggagtctaggagtcttcctgctttatctggttctttctcctctgttgactcttcagaggaatttgtcacatttagtttccatgctcttcctaagctcagtctccctttcttcctcctccaagagattgggttggaactcagacatgcacctccctggcttctctcttctaaggactcaacctttagaatactcttgggttgttgggatatcatgagagggtcccaggccttagcagtgttctctgtaacacattcactccaggctctgaactgtggaggttcaggaagaggcaattacacttgacccctggtggatatatatccatctggggtcggcaacaaggatgcctgaggcacccttgcatccccttccctgaggtcgcttctccctctagaaggacccagtagaaggctgtgagaacagagcatgggaaatggttgagtccaatttctgcctggaatggaggcaatagggtcatggttccaaccttggccatgcatccgatgataggctgcaggcttctggtcaagtggtccttgaggagaaagcataagagaaccattggatgcttttttcctaccacaaagatcctgggtgttagagaagagttgaaagccactgagccagagaggagcatagccagagatggagctagctcaggatggccaaaggggcctcccattcttcctctggaagctcagatcctctgcctggatctgttcctgctgtctgagacttggttgccaggtccgacctgcagaccctggctgaatgacagatgaaggaaggcactcagacacaggtatccagtgaaagagcaggctaggggatgggccacttacagaccccgaggagggtgctgtgaagagtcagcagctgtggcctcaacaagccggccctgtgggcatttattcagcacaggtttaatgacaaaggctttgagtcaacacacttgtgggtaatcagcatggtcgccctccccagagagagcagtcctgtgcggatgactaaaggccaggttccttgtgacagaaaaccaaacactgcaagttctcactcataagtgggagttgaacaatgagaatacatggacacagggaggagaatatcacacactgggacctgttgggggttgggggcctggaagagggatagcgttaggagaaatacctaatgtaaatgacgggtgcagcaaaccaacatggcacatgtatacctatgtaacaaacctgcacactgtgcacatgtaccctagaacttaaagaataataataaaatttttaaaaggccaggttccaaggcctaagtaaatggacttacctagatcagtttctttacatccccttgttatctaacctaagctttcaggcaccagataagagaatctggctgctttcagccaaatccttttctgaagctttgtaaaacctctcggccttccaagaaggtttgcatctttctaccatttttcccatcaccctgaccgatctcctacacttggtcactggtctgatggtcacagcccattcctgactcctaaagagtcgcccaggttttgaggccccctcctttatcctccactcctgctcttttccactagtggaaggaaggtcttgcaagtccagactcgggctgggcagtcatacaggtagcgccaaaagctccaagggcccacaggatcagagaagaaagccaggaagtctagaggaggagaggccatagcccataggagtatataattacagttctagctacatcttatcagtaggatatcacctgcagtgaggcagcaccagcatgatgtcctgaggaatggtgagctaatcaagcatgtgctgacttgatttcatcctagagctgcagagatcgcagttaataatgatgtgcgctataaagacacatgcacatgtatgtttactgcggcactattcacaatagcaaagacctggaaccaacccaaatgtccaacaatgatagactggattaagaaaatgtggcacatatacaccatggaatactatgcagccataaaaaatgatgagctcatgtcctttgtagggacatggatgaaattggaaatcatcattctcagtaaactatcgcaaggacaaaaaaccaaacactgcatgttctcactcataggtgggaattgaacaatgagaacacatggacacaggaaggggaacatcacactctggggactgttgtggggttgggggaggggggagggacagcattaggagatatacctaatgctaaatgatgagttaatgggtgtggcacaccagcatggcacatgtatacatatgtaactaacctgcacgttgtgcacatgtaccctaaaactttaataataataaaataaaataaaaaataattaccactgatgagcatttatacagtacttaactgtgggcaagacactcttctaagcactttacaatattaactcatttaattcataataaacttttgaggcaggtactattatctctgttttacaggtgaagaaactgaggcacagagagattaatctgccaaaggtcacacaactagttagtagcagagccaggacttgaacccgggtaatcctggctctggagttccttctctgaattactggaaaaaaccatgctgcccctctgaaggtgtactactaactctgtcagttaaaccaagttgcttctggtattctctgtttatcaacatggagaaagatgcgttttccagatcaatagcttattctcaaatgccaggagctgtatttactaattccagcaaggagaccacatctggtcccactacttgattaagtctttgatagatacagttattctctaagtcccattaaccttttgtaccaaatgggtgagctgggtagagatgtgataggaatcaggacacagcaggttttaagtctttgtgacctgattgctgatttttctaagggtgcacttttgcttttgattcacttcagtgattggggaagatttcttcagtgacatgggcttgatcctagcataatttattctataaacatttgagagttcactattaggctctgggaatatagtagtaaattagagaaatggtctttgcctttaaagcaatttctatctctcttttttttttttttttgagacagagtctcactctgtcactcaggctggaatgcagtggcacaatctcggctcactgcaagctccgcctcccgggttcacgccattctcctgcctcagcctcccgagtagctgggactacaggtgcccgccaccacgcccagctaatttttttttttgtattttcagtagagacggggtt[145 bp omitted]aaacataaccaaggtaattttaggtactataagtattatgaaatttaatgggatcacatgcaacttggccgcattggggaatggccacattggggaaaccaatgtgggcattcggttacttgctgagatcagtcaactaaacactcagaatattgaaatatcctaagaaagagcctcgtttccactgggcctgccaagatgcaaacttaggttaggaatccatttatcacctggccaccataagcacctgttgagactgacaaaactcagtggtgttctgccttcctggggcttagtgtcagtacgagcaaatggctgtcatttcttttgggaatggctgggagaaagctttatggggcagatgtggagtcacagagaattcttcctcgatagtacccagccatcctgtcatttaagggagtctggattcatgaactgaatcaggtcagggaattagatgaaaagttaagactcttcaacgcaggttagatatctagttttctatgcgtgagcatttttgctttgaaataattaagaactgagtagcagctgggtgtggtgactcatgcctgtaatcccagaactttgggaggccgaggtagggggatcacctgaggtcaggagttcaagaccagcctgctcaacatggagaaacaccgtctccactaaaaatacaaaaattagctgggcgtggtggcacatccctgtaatcccagccacttgggaggctaaggcaggagaatcgcttgaacttgggaggcagaggttgtggtgagctgagatggctccattgcattccagcctgggcaacaagagcaaaactctgtatcaaaaaaaaaaaaaaaaaaaagaactgagtagcctggctgtgaatttaacttctggagcaccaagtcacggccagcattctctgcatgtcataccatccctggagatctaattccatgactgtccaccttacctctaatggttaattgccatgatctgggcttggccactttgggcttctcctgttgctcccaagatcaagaccctatttgaacagcatccctatccagcagaattcctatttaacttgagtacagacatgaagtgctatatatttatttatttatttatttagagacagggtcttgctccgttgtcacccaggctagagagtgcagtggtgcaaccatagctcactgcaacatcaacctcctgggctcaagcaatctgcccacctcaacctcccaagtagctgggactacaggcacacaccaccgtgcccagttaattttttggtatatttgtagagactgggtctccccatgttgcctaggctggtcttgaactcatgggctcaagcaatccacccgccttggcctcccaaagtgctgggatgacagatgtgagccactgtgcccagcccatgaagtactttttaaggacctctttgcttacttcattttatctgtcactcctggcaaggatgaagcactgggggatgtgagaagtggtgtgggggcagaacacaagggaaagccacaccaccctccctgcctgctgaagcttttgaattcctgccttttaattggtgtcttttgatttcatttctttatggccacaattaggtctgaattgtgttagccagaccagcaagcccttagaatcatagtaggctgattttcaaactagatctgtaggtgaatgtattcatattaatacattgagtcatatcccaaattacattttgtctgtcttggctgactactcaaaaaattcatcccctgaaaaaatttccccattttaagaaatttctgttttcttttctttttttttgagacagagtcctgctctgtcgcccagcctggagtgcagtggcatgatcttggctcactgcagcctccgcctcccgggttcaagcaattcttgtgccttagcctcccaagtatctgggactacaggtatgcaccaccacgccaggctagtttttgtatttttagtactgatggggtttcaccacgttgggcaggctgttctcaagctcctgacctcaggtgatccacccgcctcagcctcccaaagtgccgggattacaggcatgagccaccgtgcccagcccccatttaaaaaaatttctaatgcttctcctagatagccctcactgcacctcccctcccattccagcctcatttcattctaaaagctgtgctgaattctgactttggttactaaggaagaaacaatgaaagatggggcatgagggaaatgattagccttttcccaaaaagggagctataatttaatcagacaggaagtgaaattgggataattttagaaaagaccagagacttaacagagtactagccttttgaatcctcccagatatcccaatttcaatggtcatatcccactctttaccaagcaattccttacctttcatataagagacctggaaaaattgccagttcaaccagcagccagcagcctatggaatctacaaatttatttctcactgaaactgagtcttgagatttatttgcatactctaaatacaagtccttttcataagtatctttgaaataagtatctttgaagtatatttttccagcctgtgacttgtttcgtaagaatctttgaaacatattttcccagccggtgacttgctttctgattattttaatatagtcttctgaggagcaaagtttttgagtttgaagcagtccaatttatcaattttttttggtagtttgtatctttcaaggaatttgcaaatttcatctaagttgttcaatttattggaacaaaaagtcccagtattattctgtgggaatctgtctaatctgtagtaacgttacctttctcatcctggacattggtaacttgtgtcttccctcttttttgcctgatcactctggctagaagtttatcaattgaaaaaaatcttctcaagaaccagcgtttgggttccttgatattgtgtgtgtgtggggggtgggggggtgggtttctcatttctatctcatttctgagattgctgtttttatgtctattatatcctttctcctaattaatttggatttaatttgctttttctattttttttagtgaacactgatgtaactgatctgagatctcttttctcttttcattttttttctttttttgtagacagagttttgctcgttgcccaggctggagtgcagtggcgcgatctcagctcactgcaacttctacctcccgggttcaagtgattctccagccttagcctcctaagtagctggaattacaggcactcgccaccacgcccggctgatttgtttttgttgttgttgttgttgtattttttaatagagacagggtttcacca[139 bp omitted]ccccaattctccaaattccatgttgtgttttcatttccattcagttcaaagtaccctctgatttcccttttgatttctcttttgacccatgggctattcagaagtatgttttcagtcctgagggccagaaatggtgactccatattcttctctggtggtggaaatgtgagattcgaatgttgcgtatgacgatgtgcccaccctgtggaaatgctggtcttcatcggaagacagtgagatggagctgcagagagaagaggtgggagacacactggaagtattattctcttagtccatttagttcccacctgggctaatatttcttcatcttcgcccatcttatctttttcttcttctcttctgatgttctctttcctttgctcatttatctaggtccctccatttagtccattttctggatgaagaacccaagttagtgacagaatactgaaaaaaatgtaagatcaaattttaagaacatgtcgcccccacccttctttttttttgagacggagtctcaatctgtagcccaggctggagtgcagcggcgcaatctcggctcactgcagactctgcctcccgggttcaagtgattctcctgcctcagctgcccaaataactgggactacaggcgcccgccactacccccagctaatttttgaatatttagtatagacggggtttcactgcattggccaggctgctctcgaactcctgacctcaggcgatccgccagcctcggcctcccaatgtgctgggattacagccatgagtcaccacggctggctgaacagtccccttttcaataaggtattttggggtttgtcttcagtagtggcgcttttctttccttacctggcatggtgtctacgaggggagttgtggcagccctcaagggtcttttagtaaaagtcctaagttcccatctagggttagctattagttacatggccttatggcaagcaaatggatgcttgtgggccttggtgtgttcatcagtaaaatgggaactctgcagtgatgagctgtagtgggctcctaccagttcctgagagccagttgttaaagattcgggagcttcacgagtcttgaaatcagccatggcggaattatttacgacaataaaatcagcaaacgttacaaattaggactttttttttcttggagagcacaagaccagcacaccactagaattaggatactgtcatttgacacctcaccgggttttttaggaaaacatctctgaaagatgaagagtttgcatttgcaaagggatgatgaacatgtgttttggaatcagccaaacgtggactcataccctgccctgctaccctctagtttgtgaccttgacaagttccttcttctgactgagccagagtttcctctacgttgaagtgacagtaatacccatctagcagtggtgatgtaagaaattagtcaacagtgtgaactgttaacactgaataaataactggctgcactttgcaaagaataaaacatcatttatttggaaaagattattaagggatgatctgggccaggtgtggtggctcacgccagtaatcccagcactttgggaggccaaggcaggcagatcacttgaggtcaggagttcgagaccagcctggacaacatggtgaaaccccatctctactaaaaatacaaatattagctgggcgtggtggcacactcctgtaatcccagctattcgggaggctgaggcaggagaatcacttgaacccgggaggtggaggttgcggtgagccgagattgcgccactgcactccagcctgggcaacagagtgagactcggtctcaaaaaaaaaaaaagtttctgtggaactgttgctttctttagttccagcctccatgggtggggattgacaggtggcaggcctcgctggttatccagtcatttcctttttctgcaaggcctcagaaagtacattagtatcactaccactaatgtcaccaccaccactagtatcaccaacaaacatttactactacatgccaggacctgctccaagggctctacataaatgaactcatttatgcttcaaacattcctattacctaaataatactggtagctccatttttcaggggtagaggtagagacacagagagtttatattctgcatttggatcatatttgactatttttgatctaccaaaatggcagtttcatggggttcaacctaataacgtgatcagggtcatccagttggttgtaggagggccagaatctgctttctatgaaggcaacactttaagcaaatgaccataggggttttttgttgttgttgttgttgtttgtttttgttttgtttttttttgagatggaatctcgctgttgtctcccaggctgcagtgcaatggtgcgatcttggttcactgcagtctctgcctctcaggttcaagcgattcttctgcctcagcctcctgagtagctggaattacaagtgcctgccaccacgcctggctaatttttgtacttttagcagacatggggtttcaccacgttggccaggctggtctcaaactcctgacctcaggtgatccacctacctcggcctcccgaggtgctgggattataggcgtgagccaccatgcctggccgaccataggattcgaacagatatcatgaaagatgaagagggcaggaaaaaagtaaagagcaatgagtctcataatttatatcattacatcttaatgatataaatcgagataaaatacagttggatcacggaatactatgcagccagaaaaaagaatgaaattatatcctttgcagcaacatggatgaacctggaggccattatcctaagtgaactaactcagaagcagaaaatgaaatatctcatgttctcatttataagtgagaactaaatgatggatacacatgaatgtaaagatgaaaataacagacactgggacttcaaaagaggggagggcatgaggagattaagggttgaaaaattaccaattgggtgctggaagggccaattcaatgaatacctcactcaccatgctgtcatagatatttctaccttcttttgtaattgtttttcttttttttttccaatatttgggtgatggatacactagaagctcagtccccactgttacacaatatacccatgtaacaaacacacatttgtacccctgaatctaatatttttaaaaggagataaaacacagttgaaaacttaaaatattggccagttgcggtggctcatgcctgtaatcccagcactttcggaggctaaggcgggtggatcgcttgaggtcaggagttttgagactagcctggcgaaatggtgaaacctcttctctactaaaaatataaaaaaattagccaggcatggtggtgcatgcctttaatcctagctactcacgaggctgaggtgggaggatcgcttgaacctgggatgtggaggttgcagtgagctgagatcacgacactgcacttcagcctgggtaacagagtgagactttgcatatgtatatacacatacatatatatgaacaaagaacaaagtttaaaatattgtgttaaatgaatatgattgaaacagaagtgatacaaaaatagagaataatgtaataataaattgaatgtaaatttttaaactgtttcagcaaaatcaagccacaaaagggggctatctagacaagacaggcaaagtacaaatctggcagtagagacaagttcccaagccccttgctctccttatttccactgatgtggttatctttgagtttggcaattttagtgtgtggttctttgctttcaattatctttcagagagcagtctgtgtgttcaatctggcttctagatgggggaaagcctgtgaagttatttccgggctggaagggccaattcaatgaatacctcacccaccatgctgtcacagacatttctatcttcttttgtaattattactattttttttttgagatggagtctcactctgttgcccaggctagagtgcagtggtgcaatctcagctcatggcaagctccacctcccaggttcatgccattctcctgcctcagcctcctgagtagatgggactacaggtgcccgccaccatgcctggctaatgttttgtatttttagtagagatggggtttcaccgtgttagccaggatggtctcgaactcctgacctccttgaactccttggcttcccaaagtgctgggattacaggtgtgagccaccgtgcctggcctaattggtttttagttacgtaccaccatactaaagttattgttttgctacttgctttcttttccaacttaaaattttggagcttttcccagatctctatagattggccctatagattcttttcaaatgttgcttataacttcttaatgcaaatgaaccatagtttgtcccccaattcaggagcatgtagattttttttttttcggacacagggttgaactctgttgcccaggctggagtgtggtggcatgatctcggctcatcgcaaccttgacgtcccaggctcaagcaatcctcccacttcagcctcctgagtagctgagactataggcatgcaccaccatacctggctaatttaaaaaaaaatttttttgtagggatgggggggtctcactttgttgcccaggctggtcttgaaccccaggtctcaagggatcctctcactttggccttccaaaatgctgggattacaggcgtgagtcaccgtgcctggccatagattgtttctaagcttttgccattgaaaacaaaaatgtcctaaaaagaaacagtgtcctgaacatcattctttatatatcttctaggagaaaaactttgtcttgttacattaaattatgttctggtgtgaaggaatttacatatttaaagatatcttttattggagaaagagagtggctagtgggcgaatgtagagggagcgtcctcaggatgtggcctgcccttttgcagatgccgactactggagtgtgttattagccttgtaattttctccgatgtttgccatgaatgaagcacttgagctgagtatcaatgataacgttttcagaatggcatgtgtctccttgggtttgacattcccattctctcatgtgctgtcccttagacaacatattctccacgacaacctttttttttttttgagatggagtctcactctgttgcccaggctggagtggaatggcgcaatctcggctcactgcaaactccacctcccaggttcaagtgattctcctgcctcagcctccagagtagctgagattacaggcacgtgccaccacgcccggctagtttttgtatttttagtagagatggggtttcaccatattggccaggctggtctcaaactcctgaccttgtgatccgcccaccttggcctcccaaagtgctaggattacaggcgtgagccaccacgcccggctgacaatctcttgtaggtgacctggtatcttcattttcctttcagggactgaggacgctgggcaagacaccgtcaacacaaggctcttcaccagcctgggggaaaaccagacatccgcatccacacctgaaacagggcaagccgcctcctgacgaaagccctgtgaaacacaagaagcattccttcaggattcttctaaagataaaagaatctcggagtagggcttctattaggtaaatggcttatgataacctcatgtgagaggttaaacaaaggttacagggcttagaacagcactgaggggactgggcggctactcgagagagatcaaccaaggactgggaggtgagtttttgtcccagacacgtgctcattgcagtgactttgagcaagtcacctcatccccctgtgtcttattttcattacatggcatatgtagaaagaggatcttctagctcggacaattgtttgattgtactgggaagtggttaaggctctggagtcacactttctggatttgatgaccagatccactgtttactaaatgcaggatttggaaaattgctcatctataaaatgagcttgatgaggcaacctacctcgctgaactgtgatgaggattacactcattgggaatattcacaatagtgccaaacatataaaagtgttcaataaatgttcatttttattatgtctataaccttctaatcaaagagagcattgtaaatcttaagggaagactcaggaagaatgtagaacaaaagtgagtgtttcggttgggacataaggcacctgcagaggaaattcttctatgatgaggagaacttgggaaggacttaattttatcttaaaacccagagagctcttcaattcagctatgatgtgttttccttgccaggaccctggatctcaaagaggaagggaagaagaacactctttgactttctcctctttgtgtggatgttggattttctgctgggaaccagactggcacagaggaaggtgagactgttttctttccactcctttactcagtccctgatgttggtgctataagtagcagtcagagtccaattaggagacagaaaccacacagtaatttgaacaagcttaatataaatataccttattaattacaacatgttacagcataacaacactataacagattattgaggaattggctcataataagtaaagagaattctaaacaatgtgggagggtcggacgcagtggcacacacttgtaatcccagcactttgggaggctgaggtgggtggatcatttgaggtcaggcgttcaagatcagcctggccaacatggtaaaaccccgtagtagaggcacgcacttgtaatcccagctactcaggaggctgaggcaggagaatcgcttgaaccctggaggtggaggttgcagtgagccgagatctcaccattgcactccagcctgggcgaaaagagtgaaactccatctcttaaaaaaaaaaaagaatgtgggaatagcagatatacctctaggggctcagatagagtattcaggaatgagaccctacatccccacgactggggtgccaatctatggccactggttggagacaagttgagtggtactgcaccctggaaggcgggaaatctgccttccaggatgttgtaggggaagctattcaaaggaggtttctcccaggaggcactccaatacagtactccaagggggttgctggggaagctgctggctgccatgcaccgcacaagctggatattggaaaagccacctgcattaagggagcctgctgttggacatgctgcctctgctgcaggagctgggcactggggaagccctgcctgtgcggcaggggcttgctgagagaagcactccagcacccaggctgaaatccctctctggcgccctctactgacaaaacttgacatcatactatctggaaatggaaaaatatctaaagggctcagatcaattttcttttctttctttttttttttttttttttttttttttttttttttttgacagagtctcacactattgcctgggctggagtgcaatggcataatcttggctcactgcaaccaccacctcccgagttcaagcgattctcctgcctcagcctcctaagtagctgtgattacaggcacccgccaccacgcctggtttattttttgtattttttttttgtagagatggggttt[142 bp omitted]aaattagaaggcaatacattgatacctggcacaagtaaatttttctcattcttactttgtagatgaatgggcatctcttacggggtctcatctttctgtaggtagctcaacttctgtgccccgtcctccagtcttccagagataatactcctttagctctgcagggaccaaacgcccaaccagtgatcagttccaatagtcctttgtgctgtttggcatctgttcactggtctgactgaaattctccttttttactgacacctgaagagatccctttcttaattttgagctttcctatatcttaaaaattttgttgttttattttatttctggaatcagaggaagaagtcctttaattgaattcagcctgccatattggctgaaagttgactcagaagtagtgggcaacaaagaaaatgaacatagacacagagatgggggaaagaatatcttacatgttggtatgcaaagtaatgatgttgttttgtaaacacaaaaacagacgggaccacctcttagtattttcctcatagaccagataaattttgagtctgaaatggcctcttggtttcctaaacaagtgaatatccttgcaaaagaagagaaaacgccctatattctatatgaaatgtttactgctttttattaactattaaccaatgtatgaccatagtaaaaaatttcaaatatatggaagagttgaaagaagaaataatgccatgtgcacaatatagtcagaatcccaataaccttcccagaagtcactattaccagtttggagtgtttccttccaaatttccatattttctttgtgcattcctcttgaataaagaaaaatgtaattttcatttgtatgtatgtttatacataactgagaacatgatgcattttttttttttacaatttgcttttataacttggagatgttttcatatagtcttttatggatatacctcttccttttccctctgatatttctacaggaagcacatctttcttccttttagtcatatgtctgcatgtcactgatcccactcctgaatccagcagtgaacccatcactcagacccagcatttcagtatattgctcttggccacagcgttgaaaaaaaaagcggggggaggtgggaggtcatcggaattgtctcaggttcatcagtgccaatcttggactttaaaattttaagaaaaactgatgcttcgtattctgtagtactacaggtagcaaggattacttaaccccattgatgggcatttcattttatcccattttttggttttgttttaaacacgggagcaacggaaatggttctgctcttctttaattcaagttttcatgaatgagcaaattatttatgtccttctgtatttcttttcttcacctagttcttgcacatgacttttattatttattcccacatatttgatagttttcattgccattggaaatggaatctttttctctattacattttcaaatggctttttttgtatgtgcatgacagagtctcactctgtctcccgggctggaatgcggtggcgcgatcttggctcactgcaacctccatctcctgggctcaagcgattttcctacctcagtctcccatgtagctgggactacagtcatgagccaccacacctggctaatttttgtatttttcatagagatggggtttcctcatgttgcccaggctggtctcaaactccagagctcaagtgatccacctgccttggcctcccaaagtgctgggattacaggtgtgagtcaccatgcccggctgttttttttttgttgttgtcgttgttgttttaattggatcttgtgtctggtcaacttgactttgttattcattttttagaaataattgattctcttattaatactaactttgtctcttccttttaagtgtctgtacttctaattttcttgtttctctacactagttatgaccaagagtattgactcatttgtggtgatgaaagctaacatccatgtctagtttgtgactttagtgttttaccttttaggaatgatatgtgttgtaaatatccttcctttatgttcctttaagaagttgagacctttggctaatattttcttaaattaggaataaatgttaatttttccattttttatagtgaaatgatcatgttactttttatgtttaaagtatgtttaaatgtgtattctgtgggcacaagttttataaataactattagatcaaatttattgattaatcaaaaactcataacactttactattttttacttgatctattgatttttgagaagactattattctatattattatgatttctccactgtatttcgttatgtttttgctttatatgtttaaaaacattatcagatgcctgatttgtctattttgtttgtattttgtcactataaaatatcttcattttacttaaatttttattttgctcattattttgttacatctgtgttctttttgttagcatttgacaagcgtatctttcaatattccattttttaaggtgtgtcttttgtagataccatacagatgaattttttcttaaacgtaaatcagatgatctccatcttttaatggtaaatttaacgccatctcatttattgtgattactgatagtttggacttatttttgcttcctttctgcctcttattattgatcagatcaaatttcctttgtttcttcttcaataatagtttaaaaatttatgtcttatttatatcctagtgtttactttaacattttattttacatattatatttttctatcagaggttagatttaactggtgcaggacacaaatcttaacaaactacttccttttgtaaaaaaattattttggctactcctggatctttctaattctaaatacattttagaattagttagttaatttatacacacatacacatacacttgctaggatactgattgggattttatttgatctatagattggtttggggagagttgccatcattataatattcagtcttctaatccacaaacatagccttccagctatttaggtctttaaaaatttctctcaataacatttgtagtttactgtatagagcccttttattttattgtgtttattcttagttatttgctatttgatggaacatctagaattgctcattcttcaggatttatgttttccgatattgcctctgccccattgcgtctatctattctcttttttggaacgccaattagaaatattttggaggctaggtgtggtggctcacgtctgtaatcccagcaatttgggaggctgaggtaggcagataacccaaggtcaggagtttgataccagcctggccaacatggtgaaaccccatctttactaaaaatacaaaaatcagccgggcatgatggcgcatgcctgtaatcccagctactcgggaggctgtggcaggagaactgcttgaacctgggaggcagaggttgcagtgagctgagatcatgccactgcacttcagtctgggcgacagacctagactccatctaaaaaaaaaaaaagaaagaaagaaatatgttgaaacttacacaatgcctcttaaattctcttttatattttccatctccttgcctttctgggctattttctggataatttcttatgacctgtctaatagtctgctaattagctatgtaatattttctgcttaagcctattgtgggttttctttgttgttttattttattactagaagtttttgttttttagttataatagtcacttatagtttattatccactaaagacattgttagacttatcttttactttttaaaacatactaagcaccattgttttctactttgtgtttctattgtctattgtttctcacttaccatgacttgttatattttttattgtgggcttatttttgattgtgaagttgtcatttatttcttgttcatggatctacaggtcagccacagcaggctgcaccggacattgatccaagcaaatcagttgcccaaagctcaaattagaaagacagagttgtttacccccattcatttactggatggcatcccaaagttccatggcaaagggcatggatttacaatcctactacagggagaaagttaatatttgtgaataataatttagtctatcacaatatgactgcataatctagtctaccacaatatgcctgcctatttgggggtttctggggtttgttttctgcttctcatgctccaaaagtcatgaaaactgaagacctaggatcagcacatattctcagggcaaaagcaagtccaatgccctagttacatctttaaatttctccttttgcttaggcttactcctgccaaattagccaccccaaaggaaaaagttgtggttatttttcttaaaattttagtcaaagtcctgagattggcattgatgagcctgagacaattcctatgacccccaccccccttttttgttttcaacactgtgaccaagagtaatatgctgaaatgctgggtctgagtgatgggttcactactggatttaggagtaggatcggtgacatgcagacaacataactaagaggaagaaagatgtgtttcctgtagaaaagtcagagggaaatgaatgctgggcaggcaagagcaaaatggatatctactatttgtgcttatctctaaaatcctggattccaacagctgaggattatagcagaggacactctgggtggagtgaagacatgaagctatgaaagggtgggattgtttaggggaaatcgtgtcttttgataagggtgtagaatatgtactgggcagtggaatggaacaaagctggtgtatttgggccagtcaatggccaagcgcttagctaaggcattgggaccttatttggcaacatgaagagcctctaattcaaatatttttttataagtttcgactcctccaggattttcaggcaggaaggaaagacaaacgataaagataggatatgcaagggaaggatccaaggcaacaggctgattaatgcgggtcaggataaaaacaactcaatcaaaggagtggacaggaagcagaaactggggactgtcagacagcggaggaggagaagactctggttccagaggtcacgccagaaacagatgtccgctgaatgctcctgactcccgtggaaggacacagttgctggcagccatcaacacagaaacagtgaccatcaccctcagtgagtctgccattttcccacccatccccccttacctcattcacttctagactcatttttttctctagtcctccttgtttcccacgcggttttagacagaaccattcattcgatggcttgcatcctgctttttccagcccaaccacttccctttcatctactcgacagatttagctcagcatgtcattttttttcctctttagcccttgagttgttcatctataaaacagaactgccctcttgctacattcccttccagttctacagttctctgaatcctccagtgccccatccatctctcccatcccttctgatcttcttccatgacctaaccaagtccccttctggtcatttccttttaactggtgaaagcctacatactgttatacatttaggtttctatgtatatctggtatatccagcatgcagcctcgtacagttaaaatatattgagatgtttatctaacttgttttaactttggactgtaagctcctcatcaacatgggctaaattatcacagtgccatgaaaagtatgcttattggaattttctatatagagagtgtattaattggggagaagagagcctagattagaaatcagagctcttgagtgggctatttactagttaagtgacttttaacctctttaggctggattaatgtttgatttctctgcctccccatgatgcagagaagtgaatgtgaaaatagaccaatctaccttttcatatgagaagtcctgtatcagtgtgaatctaataatcataatgagcaccatgttcaagtgccaagtggaatcagggagtaaagtacagccagagctctcagagctgttcttttttttttttgagacggagtctcgctccatcgcccaggctggaatgtggtggcgtgatcccggctcgctgcaacttctgcctcccgggttcaagcgattctcctgcctcagcctcccgagtagttgggattacaggcatatgccaccacgcctggcgaatttttgtatttttagtagagacctggtttcaccacgttggccaggatggtctcgatctcctgaacgcatgacctgcccgcctcagcctcccaaagtgctgggattacaggcatgagccaccgcgcccagccggcattgcatgttatatggggattatgtttgcaaatcagtcaaaactgctctggaagtgactgtagatcacacgtgaagggcaggataccctatgtagtgttactatggaacattaaatgtgttccatccaaaactaagatgcttatattcgttcctctaagacatctttagtcagagtttctcaacagcctttatttaattccatttcacctgtaaggatatctttttagctagtattacctatgagttcggccacatgaaaaacgtcttttggttctttctcaaagttggaaaacccttcaaatatcccacaaagtattccaacaggcggtatcagcacacacccattgttttatcattttattatatattttgccaatccactataattgatttctcataaattttatgtgtacacattaaaggcatggatgatatagctccacagtaacagaagtaaaaatgaattgatagcataactcaaccttctcaaggccttactgacctgtgggcagaaatgcaacatcaatgaaaatcacgcaaattccagcggctctcacaatgctgaaaatttctacagtgtgcttctaaagtatttctggtggtctctagggagaggcctcacaggtgcccatgagcaagactgcccttgttggtggctgcccccatatacttcctcgtgcatggaagggcctcatctctatgcaaattcttgcaggtgcatcatccccatcagtgctcctgaacaggtgtgtgtagctggcatcactgctacggtagtaagaaccattaatggaattatgaatcttgcttatatattgtcgcatgccttgccaaacctcttcacatttgattatgtcaggaggtgaataattaagcaggataagggttcggataaaggtgaaggtcatgacgatctcattagaccatcaaagggtccaaatattaatatgggaacagtacaataaatacaggacttttcataaaagtaataactat[147 bp omitted]ggtggtgggcacctgtagcccctgttactcgggaggctgacgcaggagaattgcttgaaccttggaggcagaggttgcagtgagccaagatcgtgcagctgcactccagcctgggtgacacagccacactctgtctcaaaaaaaaaaagtaataaatatataatcaagtattatttaaaatgtcaagttgatgggtgcagcacaccaacatggcacatgtatgcatatgtaacaaacctgcacattgtgaacatgtaccctagaacttaaagtataataaaaaaaatttaaaaaatagataataaatatacacacgagtataataaaatacagaacttttccttcggtaacactcagtagtgtcttaacagatgcccctcctgactttaaacatagagttacctcatttagctagaaagatacttgaagtttgaagaaaagcgtattgcacattttattttaaaaagtcactaacattctgttttaagtaagtttaccttaggcgtcccagtgtttggggcatgcttctgaatgctcgaattgggggaatattttcctcaagtgggtatttatttttaccctcctctgggctcatatttcttctttcagagagcgcacagggatgaatttgtctgtttgtttcttgtttttggattgtccagtggagaggcaatacaggtttgactcaggggacaggaatggcctcaccattccttggaggtaagtgggtcccctgattgaggggagtttctgtcttggccaaggggcacctggacaaagtcttgattttcttcctgaagcaactggatctgctgtctttcccagcacatctgcatgtggaatccatcccagttccatatccctgccctctcctctcaacaacatcttgaaggagtcctttctctcatagctcaggggcagggggcatttttgcagacggagagctagaggtagacaggcttgctgagggctgaataggtcttgccttaggatcctgagagaaaaggtgttcccagagctgcctcgtttccttggaagacctgttcttatgggtcttttcttttcattctttagactgaagattcttcctgggcccaagggaaaggtaagtggaaacattctgaacaacacccattttggcatccaggactcattcggcaacaaacaggtgcttttacccaaagatatggatgggaggacaagagaggacctgggttctacctatcgtctatctaacatctatctatctatctatctatctatctatctatcatctatctatttatctatccatccacctatatatctgtctatctgcctatccatccatccatccatccatccatccatccatccatccattaaggagtgggaaaggatagagatggaagaatgttttgttttgttaacacaaatgctgtcgaaaattctttagggtgagagcaacacaattgcagagttactgttagcatcaagatgtgagaatgtattgttgggttataaattttacattcttaagcatcagaccagttctaaagaatctttttatttcctcacaaggttcttgccttacctgacattttatgacaacaaaactatggtggatgcttatgtacaagctccacagtcctttgagtcagaattctgattcttaaacacacacacacacacacacacacacacacacacacacacaccttaataaagataaatgaattaaaagaattaaatatttggagatcattataaacaggagatgtatggatggcagataaataattcttaaatcacatgaaacttgcttaagtaactaatttacaatgctgagaaaggcttagtcatccactttaaaaaattaaacctttcataaagaacaccaaataaagcaagggttgaatagctactggacttcttaaccaacaccttcatccgagtagttttagctggatggtctcttctcaggatgctccaagcccaggtcagttctaccctctgcattagtgtgctagggctgccatagcaaaatgccacagactggggtggcttaagcaacagaaatgaatttttctcacagttctggaggctggaagtccaagatcaaggtgtcagcaggttcagcttctctggaggcctctctccttggcttgcagatggcagccttcttgctatgtccttacgtggcctttcctctgtgcacgctcatccttgctgtttcctcctcttcttataaggacaccagtcaggttggattagagcccaccctagtgactgcattttaaattactcatctctttaaaggccctatctccaaatagatcacattctgaggaactagggcttatgccttcaacacataaacattgtagggaaacaccatttaatccataacacctcgtaaatgctctcctgcagcttgtactcatttggacttgaggtgctctctgtgccattagttacctttgaacaaagcttggcctgccaagtccaggatatgtgctcactgattaacttaattaattttttaagtggatgactaagcctttctcagcgttgtaaattagttacttaagcaagtttcatatgatttgagaattatttatctgccgtccatacctctcctgtttataatgatctccaaatatgtgttttaaaaaccccagcaaaagtcaaacgcatcatctctcgacaactttttctttcgctattcatgtcctcatttcctgtgaaaataggctctcatttgagacaccctctaaactggactagatctgtctgaatgtggagaacataatcatctttcagccacttccttattcccttttttttttttttttttttttttttgagaaggtatctcactctgttgcctaggctggagtgcggtggtgcgatcttggctcactgcaacctctgcgtcccaggttaaagcgattctcctgccttagcctcctgagtagctgggactacaggggcctgccaccacacccagggaatttttgtatttttttagtagagatggggtttcaccatgttggtcaggccggtctcgaactcctgaccttgtgatcctcccgcctcagccttccaaagtgctgggattacaggcatgagccaccgcacccggccaccacttccttattctacatggaaccaagtactctgttattttgatatctggtactctttgaagtgtatttgctcatccttcactgcttcatcctctgtgtttgcctccctagaccttgacatagagtcagcagtgcccctgcgttgggggatccatacttccagtaccgcaattgtcatattgggtggtttgagtttccacctttgtgctctcagcagatgcgatcctcttcaaaccaagtggtaataatgatgggcatgggagaagtgaagggagaataaaagggggcatagcactataacacagatagatgggtagactgcggcccagagcacggagtgactaatgttcagggagcctgtcgtggcataaaagggactaggaaataggaattaaatgatctcctagagtctcctccagcaatagctcgatagccccagcttcagacttttggacatttatctagttcagtggtcttctcacagtgtgtataaaatttttccaaaataatgaggttctttatcaacataagagatgatgaatatttcatactgaaataatctctcaattatatttgtaatacaaacaaatgatgtgacatacaattctagccataggaagttggctggaacttggatgaaaagatctatgtcagggctgagcttgagtccccaaccccttatttttttattttttatttttttgacggagtgtctcactctgtcacccaggctggggtgcagtggcgtgatctcgactcactgcaacctccaccttgtaggttcaagcaattctcctgcctcagcctccctactagctggaattacaggcacccaccacgtccggctaatttttttgtatttttagtagagatagagtttcgtcatgttggccaggcaagtctcaaactcctgacctcaggtgatctgcccgccttggcctcccaaagtgctggaattacaggcatgagccactgcgcccagctgagtccccacctctataggaccatgaccatttgggagactatgtggtctttgctttctctgaaggtgctcagagataaggatgccatgtggtgtatgttattttctttaactgagtcatagctttgcatcttttcttgttccagaatcaaagggccgattatttattttattttattttgttttatttttgagacggagtctcgcactgtcgcctgggctggagtgcagtggcgcgatctcagctcactacaacctctgcctccgaggttcaagagattctcctgcctcagcctcccaggtagccgggattacaggctaattttttggtatttttagtagagatgggttttcaccatgttggtcaggctgatctcaaactcctgatctcgtgattcgcccacctcggcctcccaaagtgctgagattacaggcgtaagccaccacggcccggtcaaagggctgattattaacagcgcctcccatcagaatctcattggccagctagctgcctccacttctcactcatctttggagagtgcctgaggcgtattggggtcttactttttgtgttgccctacagaaggaaggtaggagcttcagcagagagaaggggtatgtaaaattttagcatccagcatatatcatatatacaacatataccagaagaaagggctaatgaaacacttgcagtaattcttactgctttcgtgatctgcattttttttttttttttgagatggagtcttgctctgtcgcccaggctggattgcagtggcgcgatctcagctcactgcaatctccgcctcctgctttctagtgattctcctgtttcagcctcccgagcagctgggttgacaggcgggtgccaccacacccgtctaacttgtatttttagtagagatggggtttcaccatgttggccaggctggtctcaaactcctgacctcaggtcaggtctcccaaagtgctgaggttacatgcatgagccactgcacccagccattgtggtctgcctcttataatttctttatttaatctcttctaatcctcagtagctgccttgctagcctacagcccgaaattacagacatgcttttatttgcacatgaattgcccatcaaaggagcgctaattaggtgttaagaagactctacatggacaaataatgttttaatgagattttctcaaattaattcatcttcaaaaacatgctaagatagattggagaccaaataacttatgtcaaaataattgtttctaaaaattgaatcataaaagaactggaaaaaatatagt[141 bp omitted]aaacctcgtctccactaaaaatacaaaaaaattagccgggcgtggtggtggacgcctgtagtcccagctactcgggaggctgaggcaagagaatggtatgaacccaggaggcag[139 bp omitted]tttaaattttctctacatcagaagcaagctaaggaagacatttatgacatatatagctaataagcagttaacgtatgaactgtagtttacagataaaaggtaaatagtaaaatagaaaagagcatgaacagaaaattcatagaagaaacataaacagcacgaaacacaaaaaagttttcttttttttttagacagagtttctctccgttgcccagactggagtgcagtggtgcgatcttggctcactgcaacctctgcctcctgggttcaagcgattctcccacctcagcctctcaagtagctgggattacaagcatgcgccaccacgcccggctaatttttgtatttttagtggagacggggtttcaccatgttgcccaggctggtctcgaacttctgatttcaagtcatctgcccgcctcagcctcccaaactgttgggattataggcgtgagccaccgcgcctagcccacaaaaaagtttggaatgagtgataacatttcaaactggctaagcttaaaagtaatgaaattatctaacgctgggaaagtgcagggcatgaccagcgttttaataatttactagtgggagtgaaaataaatgaattttgctatacaataaatttgtattatgtggcaaaaggctttaatatattcatggcccagaattgatacatctaggaattcatctaggagagtgatgagctaataattggaaaaatgtttatgatataatttcaggtaaacaaaagcaggttacaaaatagtaggtagaatatgatttctattattattgaaatataaattttttgaaagaccagattggaaggattgactaaaaaatgttaagaatgggtaggtaggctaagggaattttttttcttctttatgctttcccgctttttcatatgattctatattgagccacatattacttatataataaaaaagtttgtgttttaaaaataagtgattgctgcatctatcaaaggggctaacatttgtcagattaaggtagcaaaccaacctagtctacccttaggttggtgtaacaatgatcattttagttctgattatttttccttcagtctagaccagcactgactattagaaatttctatgaagatggaccgggcgcggtggctcacgcctgtaatcccaggactttgggaggctgaggcgggcagatcacaaggtcaggagatcgagaccatcctggctaacacggtgaaaccctgtctctactaaaaatacaaacaaattagctgggtgtggtggcttgaacccaggaggcagaggttgcagtgagccgagattgctccattgcactccagcctgggcgacagagcgagaccccatctcaaaaaaaaaaaaagcattaaggaactgaggagatagtttttaacagtagaatggacacggcagaagacacgacgaataaatacaactacaggtcaatagaaaatatccctagaagtaaacaagttgtgaaatattcataccatggaacacctctcagaaaaacaaaaaacaaaaaaatacaaaccactggtacaacctgaatgactcatgtagaaattgtgtaagtgacgaaagccaagcactaaaaaagcatgtactctatgattccacttacacaaaatccaagaacagctaaaaatgacctatgggtgattgatgtcaaactggtggttacttctgagggtagaggttgactaggtatgaggaaacattctgaggtgacagaaagttccatcacttgatctgcatggtggttacatgggtgcatacacatgtacaattccactgagctctatatgtacagtttgtgtgctttactgtatacaagaaatagctcaatttaaaaaaataccaacgatggcatttttccccccgatgtgatgtctgttatttactcatcctcctttttcccgagctggaaggaaggcccctaagtgtcctcagttgcctctatggatgctggaaagtttgtcaacagggaaggaacctgaatgctctcaggaagctgcagagtacataccatgagttgcagagctggacatgagaggagtcaggtctcctttggggagcacctaccctggggtctggaggaagacagctgggaccctggctttctggtgggtgagcacacctctgcagaagcgctgagatgtggaagcagagcctagggaccctggaagactttggcaagatgtgatctaaaagttctgaagtcatcaaatatctatatctatatttatttatttatttatttatatacacatttatatatttaatattaattaaatatattttacataaatatataatatatatcaatatatttatatattatacatacatatatatcaatatatttatatattatacatacatatatatcaatatatttgtatattatacatacatatatatcaatatatttgtatattatacatacatatatatcaatatatttgtatattatacatacatatatatcaatatatttgtatattatacatacatatatatcaatatatttgtatattatacatacatatatatcaatatatttgtatattatacatacatatatatcaatatatttgtatattatacatacatatatatcaatatatttgtatattatacatacatatatatcaatatatttgtatattatacatacatatatatcaatatatttgtatattatacatacatatatatcaatatatttatatattatacatacatatatatcaatatatttatatattatacataaatatatcaatatatttgtatattatacataaatatatatcaatatatttatatattatacataaatatataatatatcaatatatttgtatattatataatagtatatattttaaataatatgcatttatttatattatatataacatatattttcatataatatatttatatttatttacttaatataaaaataatattaattaaataatatatagatatgcttatatattatatttatatattttatatataatatattctttattaagtaagtatatatacacctacacacacacatatatatataatgtagagagagagagagagagtgtcctattatatacagcagagaaatggaaaggcataattttcctaggtggacagtttttatattttcatggaaggagtcaaggagagttgagcatgtcattctggggtgtcgcagaagcatggcagcaggagttctgaccgaggagaggccagtgaggatgtcggcacagaccaccctgcccttcattttccatttcctccagaaaatgctgaaaatacagatcaagcccttaaaacagtccgtgtgcactcaggatgtgacacgagtggctagattttgccttactggccttcagtttaaatttccaggaacgtgttgagtctctggggagttcagagaagcaggaaggacttagtagacagaactggtgggtgaagagctgactctgaagggaggaagggtgaaattttgtggctgatctgaaagaaggttctagaacctgtagggaggcatggccttttagttgctagagattagtgtaaatttttagccaaatcaagttttttaacagctttctttcaaagcatttgaaacattctcagtggagcaagaacacgtagttggcctggcacgactaaatggtctacattgtagacagatcaaaggtggaggatatttatgcacacctcaggttatttcgtaggtaaccccttgaaatatatcaatatctaaaatgagcatgtccttactgaagatacataggatgaggcagacctgatggagcccctaggaaattataaatatgtcataaatatgaaagtgtacatcatgtgtgcaaatggcttaaagaataataaaagatcacttgtgaacccactactaaacttaaggaataccaggtttttgttgttgttgctgttgttttttgagacagagtcttgctctgtcaccaggctggagtgcagtggcgcgatctcagctcactgcaacctctgcctcccgggttcaaacaattctcctgcctcagcctcctgggaagctgggactacaggggcatgccaccacacccagctaatttttgtatttttaatagagacggggtttcaccatgttggccagggtggtctcaatctcttgacctcgtgatccgcccccgttggcctcccaaaggcaaacaccaattttacccacttaacaagacccagagccagtggctctcctcggtcacctccccgctcccgtccatcatagaggtaaccgttttcccggtttctgttaatccctcccttgtttttctttagagtttcatcgcatatctgtttatcccaaaatagtatattgattaaatgtgcttatttttgaacctcacatactttaaatttgctctgttctgtctgtatctttaattttgcaagttttaatttggggccatttatttgtgtccaagagttattaatctatcctcctttcctttatgaatggctacagctaagctggagataattttctatttaattaaattgtcttttgtcatcactgcagtctattgttacatttcacttcgcttctacaaagccttagatgcctaggtaaatttggatgtgaaattcaattcaatttgatccgaatttaatcccagataaacaaccatacctcattatgcagaacaaaagaatgacccaaacatctttcacctagcgatgcagatggatttgattcaggtgaacacagactgttttgatagcctgcctcaaactcagtgtatcacaaacttctgcatcttctcctccatggctgaccctctcatcttcccagtaaaaccttccagtcatctctgacctttctttctgactcctcactcctatcagttgccaaatcttgtcagttacactctccctgcgtcacttccatctgtctctcccttttgctccacttgacgctctgtcagtcgcctgaattattttgcaacagcctcctgacaccactcccagctcagctcttgcccttctgattgctctcacacatgtgagtctccgaagcttggctctgtccacttccttggctattcattgttttctctcctttcagcccttaggggtccagcctcacccacatgactcaaaagggggcagcctgagaggtgattgaactggtggggggagagaaactttaattcaaattgggccagttccccccaccccgcagaaatttggaatgggtggggattgaggagggccatttgagagactgagcaagcttgctctgggaatcaagctctgagattccatagacttagggttagacttgacatctcagcaagtcaaggccatgtgcaagccatagctgtttggacagaaaccctgagtaaatcaagaatgacagcctgcaaagggaagagaaaaatgaagcagatatgtacagaatcagacaacggaccctgtagaaggtgagagagaagcgaggaggatggagaagtgctcccccaaaatattccaatttccaggaaccccagtgctttattttttgagatactttccttcattcttttaacaaactacctttttacattaatgagtttgaacaaatttctgtttcttgcaaactatggatccctaacatgctgctcgtccatctcaaatgaggccacctccaaaaagtcttcaatcttagttgggggttccctgaaagcagaacctgagacaaggactgggaggaggtagttatggggaaggtggcgtccaggaaagagaagcaagggagctggaagaatgagacagggaaggaaaaaagccaatcaagtgtgctttagtgggctggtcacccagctgggctcaaagctgctgcagacccttgaggtgccatattgaatgtgcctcagacttgtccttttaaagggtgggagagttgggcattgtctaccaacttctgtcccttgttggttgaaggtagtccctggggatgtgaactcttctgcaacgttggacggtacctgtaaggactgcaggcattctcctgctttagagaaagccccaagacagaaaagtggagagatgaggtagaatgctgtcagcatgcatgggagccttccttccaccatcactgcagctgaaattgtggatggagaggggattgtatcaccaggcaccaaaagcatctgcaaagtcttacagactcctctattgtttatatacctaggcattccccttgatgccaacagaacactctctagtccagaccaaactcgcctgccccagctcagccttcctgatggaagctccttgacttatttttgcaactaatgttaactttaagcaacctaaggcttccccagttaccactgtcaaccagggcacaccaggaaggggatgcctgatctgaccctacccttggaaaccccacccagttctaacatggaaaacactggcaggttattgatcttctctgtctgcaagtggtccagccattaccacccacaagtctcagctctgcgcttgaccagctatgcagtttgactgaatgacctactcagctttcttagcctctgttttcctgataggtagaaatggagctcatatttatcttggaggcttgctgggagcattgcataaggcaatgagtgagagactctagtaagggagcagatgggttgtatcagtgtgtgttagctcttcccttctccagggatatgcattttggaagaaagattgctttgcctgcaaaatatatgctctccttttcttcttggaagagcatcttcattttctcttgggaaaccaccacttctccactctgttcttgttcagacatggctgccccacccctccttccctaggagtggagcacctgggcaatcagacacgtggtggttgtttcaaaagggccacatacccaaaggtgtcaggactttagtataaactattgggaaagagaaatctctttctacgtagcttctaagtagctggaacatgcacctggagctgtgcagtccatctcatcatgatgatggaaatatctgctgagcgtgaagcccacgtggtggaatatattgctgaaagatggtaaaaaatgaccgaatcctcgtggcacctcttggaggcctgactctgaccaaaataagaatttctggttacttgggtgaataaatgcttgagttgggttcctgttgcctataacctccaaagtcatagctgatatagcatttgacttcctgaggactatatgctcagctgcaggagctggggaggtagcaagtgtgaggccagggacaagcaggtggcccacagtccacttctattgggtcttggtgtgtttccaccaacctattgattccctcttggaagggatcccaagtcagggaagaccagccacttccaggaaggggtggggaggtagggctgacagttgatggggcctgccttccttccttctttccttcctttcttctttccttccttccttcctcccttccttccttcctctctctctctctctctctctttctttctttctttcttttgacagagtctcactctgtcatccaggctggagtgcagtgggacaatctcagctcactgcaaactctgcctcctgggttcaagtgattctcctgcctcagcctccctagtagctgggattacaggcatgcgttggtgggatctttcttagctgggcagttggtgctgggccccagggttcagggtccatcttcctgcacgggtttggtccaccacactgattagactattctccctcagtataccaggctcttggagtgtctgacccttttactgcagaaaacgtttctgtcccgtgagccctgccctgagagccaaatcttctgctcatgtgttgtcagacacacgtccctgcacagaggtgcttggaatattctggagataatagtttaaccctggtgggggggttccatttgggtgcctgaaattcctactagcaatttgagaacagtaaggtccttcgattagagctgctcagttccctgataacttacagagccagtcatttctctgggctaagagcacgctgaatgatgcttatgtctccttgaaggaatgggtcatttcccgtggttcctgaatttccccaagggagtctcgcaaatttcttctggggattagctgcgtcggtcaaggcccaggctagaatttgatggcgtctattagtgttctagggctactgtaacaaattgccacaaattgggttgcttgaaataacagaaacctattgcctcacagccctggaggctggaagtctgaaatccagatgtcagcagggccctgctccctctggaacctgtaggaagatcacttcctgaccccttccttcccagtgcctggtgttttcccggcaggctttggtgttcctgagctcacagctgcatcactcctatctctgcctccatcatcacaggacacattccctgggtgactctgtctccacacagccaccttcttatagggatgcaccttactccagtatcgccccatgttaactagttacgtctgcaaagcccctatttccagataaggtcacgttctaaggtactgggggttagaaaatcatactttttataggagagacagaattcaacctataacaccgggtgattagggatcatttaatgaaggggcatcacagaggtgtggtcaggattaaagaattccaacaaaggacgaagaagctcccagggccagcagcagccaggagccatgaatgcacctaggctccaaggggcaaagggcaggattggctcccgagggtaaccagtggttcagtggcaggttgcaatcaagacactgcagcccggcaggagacagctggggtgctaaacactgtaacttcagtctctccctgccagccagtccccagtggctgagcccagtcagcagccaacagacaagggcacctgttgcagcagccacaagtgccagcactgagatggagcgctcacagcatctggaggggcagagactgtcccaggcgctggctgtggctatgcccagctgtgtgtctttatctgtgtggtcttcttgcaaccacacctaggatggcccctgaggctccaaga[144 bp omitted]tcaactaaataaaaaaaattagctgggtgtggtggtgggcacctgtagtcccagctacttgggaggctgaggcaggacaatcactagcacccaggaggcagaggttgcagtgagccgagatcgtgccactgcactccagcctgggcaacaagagtgaaactgtctcaaaaaaaaaaaaataaataaaagttgtggtctcctcagagaagagcccagatgttaacagtggttgtcagggcatctgattgctttgtctctctgcttctttaggttacccacattttttcattttaaacattttgtagatatgtgtggttgggggtgggaggagaaaaccacctgtatttctctctatgtggagtgtgaggactgcttcacgccttgcagtgtcttggggcagtccctttaaggtctggggcagttactggggcctagatgccactcctcctgggtcccaggagctaactgcctttgttctgcccagagcagctgtggctcatagaacataatcaccttcagttttctcatctgtgaaatgggtctgtcagcccttccaatgaattaaggctgatgcgaagatctaatggaatctcgcaacgggaggcccattggaaattgtgaatataattaggtgagttactactgctgtgccgaagggtttcctggagagatgagctataaaattggtttggagatacagtgctcccttgtggctattttttatattgcatgacacttatttatttatttatttatttatttatttttacccccactatgtttcaagataaagattgtggtttttcattcataggccaatgagacaccccatcctgagagcacgtcagggcctgagtgggcacagggacatctgaaatcactagggagcatttagtcagagggaggccaaggcccatagacaggaaatttcactgcagggcgcttaggctgcccaccaggtagactggccaggtccacccgcaagtctctgacctccctctgctctggggtatgctccgccagttggcaggggaacagtggagcagagccacttaaaccggagagtccttcgtgggccgttgctccacgtggcttcttttggggaatctcaggtgtctgctgtcaccctgcctcagagtcctcactctcccagaatgtggctttcagcgccagtgtggacgattccagacacaatcccttcctgccccccatccccttggggggttcttggcctggaactcacctgtgaccaggcagagccctaaagggaacaggtaaggaccctacagcgtggatctgggtcgtggccacattctgctggcagcccacccttggtgggtcccaggattggctgctgtgaccctggctccagctgcttctgtcccaaagctgccatccctactctctggtcaccaatcaagtttcagccctctcccttcgcaattgcggctcctacccaccctctgttggcttcggcctgagcaccccagtatgccctccccccactaacaacaacctctcacaagacagttcccttgcaggctccaggcctgccttgcctgctgcttcggtgagcccctgagttctgacccgacatcctgcctccacggtagcaggacgggaccaccagccttgtcctggagtaggctgagctccaggtgatcagtgaccctggacatttttctttttaaattaagatttatagatgtgcaggccaggcgcggtggatcatgcctgtaatcccagcagtttgggaggctgaggcgggcggatcgtgaggtcaagagatcga[134 bp omitted]aggttgcagtgagccgagaccgcgccactgcactccagcctgggggacagagggagactccgtctaaaaaaaaaagatttatagatgtgcatatgtgtaccctatatatgtcattttgtaaatgatttagattcagggaagaaatttttgccctctttcatctataaatattagacaagcttgagttgttacaatattagtgcaaaaaggtaccctatgctttctgagtgcccaagattcatttactgttttttgtttgttgtttgttttttctttttttgagacagagtctcgctccgtcgcccaggctgcagtgcagtggcagtggtgtgatcctggctcactgcaacctccaccttctgggttcaagagattctcctgcctcagcctcccgagtaactgggattataggtgcacgccaccacactcagtgaatttttgtatttttagtagagacggggtttccctatgttggccaggctggtctcgaacccctgacctcaggtgatctgctagtcttggcctcccaaagcgctgggattacaggcgtgagccaccgcacccggcctcatttactgttttgtataagaaaaaggagactacacgaagtgcccacctccaaggagaggatggcgttttaaatgctttttgctttgagaattgaaggaaaggctgaaatgaggtggatacttgggcagaggttctcagcatttgttagaagcaacgtggaagctaaaattccagcttggctgtgtgggtggggatggtgggggtggaggtgcaggggagagctgggggtggggttgggaggggactgaggccaatgaaatcagtctggaagatgggctgattctcatacacccccaactctagagctgctagccacacatggctgtttaagtttaaattaattataaataaatagcattaaaaattcagtgtctcagacacagggctccgtgtttcaagtgcccggcagccacatgtggccagtgctgccatgttggacaatgcatattatagaatatttccatccttgcagcactgctctaaagggtcgtcaagtcctgctctcgtgggtggaggtgacgtggccaggtcacccttgtatacagtggaggtggttttcagactgagtgcctgagcacatacgcatacagtgtgagtgtgtgtatgtgggggttacaggcattgcagctcctgtttcctgctgagtagtcaccctacagagcagggaagcttctggaagtgtgtcctgggaatgtggagaaccccaggctccgtagcttctgggctggctccaggctatcctcactgtcacgggaagacctcagacaggtgaggggtgtggctgcagggcgccccagtgtggagcataggacagaagcgccagcacctgccagaaaaacctttatttccaaggggtggcccatttggcctcctgcagttacccctcctccgggacattgagcttctccttcaccccacaggccaccacggcgaaaaagaactccgggaagaaggtgcggacgtacacggcggccttggggatggggttggccataaacacctcttgcttcttcctccgcacggtgcgcatcacctcctccgccacctctactgggtgcacgccgtaggtcagcttcctgaaaaagactgaaaggccccagttgggggcgggggttatgacctccgtggggacccggctggtcagagccctgcacatgcacaaaggctgaggggcgggaagcgtgggctgtccccggagtcacaggttccaggccccctccgccacccgcggaccgcggcgaccagcgggagacactccactctctgcgcttccttctgcgtcttcgtctataggatggacctggtttcctgccctgataatttcggagggcggttacgtgtgggggaagggatgcaaaagaggttaggatctaagaaggtgccaggtggattaagggactgttgtttgtaactgtcgtgaagctgtgcttgtcaggagcatcctggaacccctggtctgccccccatcttggatcatctcggttcctcaaggtgggcctagagccttgggcaaggtgtagcgcctctacgcttagagcatcctagagcagtggccataataaggtgcactgattgatagaggggctggttgctattccagaaccttcagtccttccaacaaccctaagagataggtattgctattatccctcgttttctaaaatgaaaataataataatagcaatacctatctcttagggaggcacgaaatgattaagggatttgctcatatccaaccctctaatacatggcagaggccggcttccagtgcaggtggcctggctttagactctcggcctccactctgtgcaagggaaagggggagcgggaaagttctttaaccccgaatccaggccatgacatctgggaaaaaggcccagagataggcagttgcttgccgaggtggcagaggaagctgagtggctgagcttagcgggcgcatgggctgtaggctgcagtgaggattctgtctaccgggtgcctcaggcctaaaggtttgggggccccgccctgctgttgggggttgctgagcctcctccacccccatccccagactcatgtttcaggagtacccatctgaaggtcattcatccccccagtgacaccggactgttcccgaggcccccaggggccccagcttccctctgaagtctcacatttccaaatggaagcttcccagtttccttgctctggatacacgtggtacgaccggatgaaagtcgggctcacggtgctgatgacaacatcgtattcctccacttcggctcggaggcagtcaaagaagcccagggctgcgtgcttggaggcagcgtctgcgagacaaaccatccggaggtgggcgcaggacactcccggccctgcttcctggtgggcgcattggaggcaggagggccgacagacacatttcctacaggcgcagagctgggaagatcctcaagaatctgcccctcactttacaaatgaggacagagagccctcgggagtggtggacatagagctggaactgaatgcagcttagccacttgctggtggtgtgatgtgattgtgggcaaatcactttgcctctctgaggctcagttttcttatctttaaaatgggggcgctatttcccttggcaaattactgtgaagatcaaatgagaaaacatacagaatgccggcacaaacatgaattccccttccttcctgggaaggctgatgcctaagaaacttgtccaaggtccggggccagctggtggctgcagtgagcctgaatcacagatatcccctctcccttcctgtttcccttttcctcggagagcccgtccaggtaatccactcaccaaatccagttcaaatcgtagaagccatgggttggggaaaaaaggatcattccaggagttccaaaaagaatagagtggacattgcttagagctttgggaagttagagccacatctggggtgtgatgcaccccaacttcacattttaggggtgtcagtcagaggcagaaggggcagaaggtggatgtactgtggttcctgccactgtgcccagatgccttcaaccagaaccctttcctggttcccctgacatcatgactagcaagcttctagttctctgcaatgaggcctttttttttttttttttttttttgagacggcgtctcactctgttgcccaggctggagtgcagtggtgcgatctcggctcactgcaagctccacctcccagtttcaagcagttctcctgcctcagcctcctgagtagctgggtttacaggcacgccaccatgcccagccagtttttgtatttttagtagaaatggggcttcgccat[138 bp omitted]attacacagccaatacaagtgttaccaaaaaaaggtctaccagcttgtttttcattcatccaccatctccttgattccttcagtcattcaacagtgaagtccctgctctggtgggtgagaagctggggacccagaggtgaatagaagtagctctggcctcatggagtcctcatttcatcagtggggcagacacgtggacaggtaactttccatgtggtgttttttgttttgttttgttttgagagggagtcttgctctgttgtccgggctggagtacagtggctcaatctcagctcactgcaatctctgcctcccgggctcaagcaattctccagccttagcctcccgagtaactgagattatgggtacacaccatcatgcctggctaatttttgtatttttagtagagatgggtttcaccatgttggccaggctggtctcaaactcctgacctcaagtgatctacccgccttggccttccaaagtgctgggattgcaggtatgagccactgtgcccggccccatgtggcatggttaatgcaggaaagagatgtgtgcctgcagcaggagggacacatggcaggctgccttccctttcaagtctgtgtgccaggttctgagcctcagagcccccatctccttgcctgggtggatggtaagggaactgtgctggggtgctcagggacactgaattccttttgggtggtcaaaagaaacctctgagtcggcagaccccaggtcactcccacgccagctccttgtgtctttccaaagccggattcagaggaagaagagaatttggggccagtccagggtggcatggcttcagttctgacatttacatgggaaactctgtgcccctcaattcctcagcttcagagaagccagaccatgactgatgggggtggagacagccttgagagaattctgagtccccaatactgtgttttgcaaatgttcccaggaaactcgtgcatttgtcctatacgggtcagtggccaaagcgcccattgtcatgcccatgtctcattatattatgtcacctctgtgttcccatcacttggctttaggcattcaaacactttgttgaatgaatgaaggcatgaagcaaggaagatgaaaagtcacccagctgctgaaaataacagacagaaagtttaaaaatacaaggagcagtggggagattcctaagtggactggggaagagaggaaaaggcaggatgtggcaaagactgctgtatgtggcccattcactctgcccttcttcctgggcccccaggtggactgcacttcccagcgtcccttgcacttaggtgcgactgagttctcccaataggatgtgagcagcggtgatgccagcctggggacaatgggatgtccaatgccagcctggggctttggacattgagcacggctcctccacagtctctttcctcttcttgccagcagggacccagtggtgaccacacggaagatgttgttgatggaatgacttagcatgaccctgggcccctcagtgaccctgtggcatggtggcatctgcttgcctgagccattcccattgaggttactacatggaggagtaatcaagttttcccacatcacaggctcacagcaccacaggcctaaactaactaaggcatatggaaaaaggaaggtaaaacactactagagcgggtgttatgggttgaattctgttatcagcctccgaaaatttatatgctgaaacccaatacccagtactcagaatgtgacggtatttagagatatttaaagaggtgattaatataaaatgagggcattaggctgcgtcctac[136 bp omitted]atatggggaaaccccgtccctactaaaaaatacaaaaattagctgggtgtggtggcgtgtgcctgtagtcccagctactcaggaggctgaggcagaagaatctcttgatcctgggaggtggaggttgcagtgagccaagaccttgccattgcactccagcctgggcaacagagtgagattctgtctcaaaaaaagaaaaagaaaagaagaggaaatttggacacatagggaggcaacagacatgcacgtgcacagaggaaagactgtgtggggacacagcaagaaggcagctgtctgcaagccagggagaagggtcccagaggaaaccagccctgccgacactttgatcatggacttccagcctccagaataaaaaaacaaatttctgttgtgtaagccccagacttggtattttgttacggcagcctgagcaaattcatataggaacctactatttttttccctcccttcttcccttccacccttgtacccatcaaacatttactgagcccctaatttgcacatggtagtgtgggccacgaataaatgtatatggcacgttccccacctcttagaactagctcatcagatgtggaaatggctccagaatttttccagctagatcccaggaacatacacctaggagtccttctcccccttgaacttttgaaaggacgctcatatttggagctgcccccaccctgaattctgcccctttctgtttttcctggtttcttcctcagaaggtctccactgccctcccattttgtgatgtgcacccacccttctctttcccaatggtaatcttccttgactttcaagggcatctttgtggaggaaggggcattggagctacgactgtgcatctttctcaggagcgtgaccttcacctggcattgtcaggttcacctagtgcatgtcctgcccccatgggagactgtgagcttcgcggacagaaggagcgtatctttaatatctcagcatctcccatagccacttgcatgctgtaggtgctcaaaaaaataggaaccatagggatgaaagaaaatccagcagatggtgtcatccttggaccctttcccctgtgaccatctgcctagtcttagacataacagctcttgccttataccataagacatacaacagaagatatcatatttttatcttagcaacttacaagtcgtacggaacgggattccaaacttcccttggatattattcactaacacgatttggcctgttctccgggagatcatgttgggaagcagggctggaaaacacaggacgatgcatcatggttaaaactttgagactgagttaggcagcagcaggcagacccctgcccccggtaccctcatcacagggctccgctacctccgcggtaactagattgcagcagggcagaggtggaatgagtcctgcaatcatttatccagtgtttccaaagcgtgggctggcgagttgctgggtgattttaaattggtgctttcccaccaatgtgcatttagtgacactgatttctttttttttttttaaatgcatatttatatttattttattttcctctcaaattttgtttagatgcagggggaacacgtgcagatttgtcacatgggcatattgcactcaagtagtgagtacggtacccagtagaacagaacagacgctcatctcggtagtaagaacatcattcccgtttcaattctcctagtatggaaggaagaaggaagaaggaggtctcacagtggttctagtgtgtctttaacgcctctcttgcacatgctaatcttttaacaaagagagggaagattgtggcgttctcaggctaccttgggagaacttaatttgtttaattttcaggttgtcctttatttactgagaatgaaagagtttttaaattcatgttggttttatacagatttcctcctaaagtgaatttaatttaaaaatgagaaaattcagagaaaggtattaaattaataatagtataggcggaatggggatatggcaaaaaatgaaaagacaatactcaaagggtcaactttcagaatgatc[184 bp omitted]gtggtggcgggcgcctgtagtcccagctactcaggaggctgaggcaggagaattgcttgaacctgggaggtggaggttgcagtgagctgagatagcgccactgcattccaacctgggcaatagaggcgagactccgtctcaaaaaaaaaaaaaaaaaagaaagaaaggaaaaaaaccaagatggacaaacggaagtccggcgctagggactagacccagggtccttagtgagttagagggctaaccaggaggagaaaccagttctggcccttttccactccactttcttggttcgttgctttgatgccagtgaagtctccgttaaaggttggtagctgacacaccggtgctggcctgtttgctgtgtccacagggactggactggaggaagctgttatctctgggacaccattctagaagctctggaaagtcatctttctgccccaaatgcgtctttctcttcatctgtcttagtactcagaatcctattgttagaggtacccagcatgggagctggttgtagagaaggtatttgcaagatcaggctagatctcagaccttgccaggacaccccactccctaaatggaggcgttctccacattacattccccctgagcttctgctttgataaacttttatttttttggagagcaggggctttaacttttcttttttttagacagtctcaccctgtctaaagatggagtgcaatggtgtgatcttggctcactgcaacatcagcctcccaggttcagaagatcctcctgcctcagcctcctgagtagctgggattacaggcacccaccactatgcctggctaagtttcgtatttttagtagagacggggtttcaccatgttggccaggctggtctcgaattcctgacttcatgatctgtcaactttctattctactctatggtcatttccagccccacttcccaggcttcagacctgcgtttgaacttgatggtgagaaatctgcacctgggtatctcctaggcccctcagacaggttcacgtaggaatcaccatcttactcattaaagggagacagcctcctgcctttccctgtttctgtgaaggggttgacagaatactgggtctcttgtagtctggtgataagccctttttcttcttcatttctgaggacagaatctttacctttgaccaactgtaatggttagaagcaggtcaaccacaaggttgatatagcagaatgtacatgattgttgagacaattgttggaggatgagacaatttttcagagacgtcgaattggagggaagccatggatgtaaggagagagaagtaaaagggcaaagcttgggtggggagaggggtttcacagagatggtggttgaaatataccaatcagatacttcctgagttccttttccttcataaacacttacaatgggaatggtgaaagctttcacccaataggtagggaattttctgaggggactggggaattccatatagaataggatgactgtctggctaattaacagaggcctctgtagaatctggtggcccagatacccatgggaaagtcaaactcacgagacctttcgtcaatgtgatggggccaaagtaattggcatccatgatctttttgtcgagctccagagaaatcttatgggcaggccccttcaccttcacactggcattgttgatgaggatgtccacacagccatagcaatccaggacttcttttgccacatctgggacacagctgatgtctgagaggtccaacaggaccagctttggggtgaatgtctgctgaaccaatgagagagtcagggtatgtgtgagatctcctccctcttgcagaccttgggagccctcgatctaaaagccacccattttgaaattcaaagataatgaaatgactgaaaaaaaaaaaaagacgaagaagcagagatgattctgggatggaggatattgccagataattcatacttggggaccagggcaaaaacaacaacaaatcttgacacgaatatgcagcgataaatctaaactcttggccagggttccagaactgataaatgaatattgcccttcacggcagtccctttgcagggttgcactgactccagtggtgacatcattacttttaacatttctgagcccctttgtggaaattgcttttcaacctggcttgcaagttgaaaaaaaaaaatctatcacagtacttaatagccatattttaaaaaactaaaatcatacactcaacacaatatttttgaagcacctactatgtgccaggcactgtgtttagccagatacttgctgcatcaagactctattgatctagggatgtgtaggagggtggacagatgggaaaattgttgacaccaaggggtaaatgcaatcccagtgtttgacaaagactagtcctgagatatgcccttgaagagagggttccgtagtcaaatttgtttgggaaacataggctgttctccaagttcttcttggagatacacagtgcacactggcatattaaaggctctgaaaagtcctgcagtgaagaaactggacaagcttagcttaactcagtgtttctcacacaattgaccgcaaacccttgcttttacccagtgcctaatcacatccctagaaacacactttggggcattctgtgttgtcctgtttgattcatctcctcaaatattagacttacctccgaattactttgagccagcaaatgcaacctcaaagataaagattagaaaaatatatcctgaagggagctccaaagacagtcccctgaccagtgctccagaaaaacctttggaaactgcagcctttttgaaataagtgttcacttcctgggagagttcttgggaagggatctcatttatctggtttctttgatggagatatcagttcaggtatttaaaaaaaaatgactgtgtttgtaatcacagtccatacctgtaacatcctctgtcttctggatccttgttgagtttgagttacatagggtcagggcaaggagctgtggctacagaacatgattttgtcatggtgggtggtcaaaacaagtcaaccctttatgaatggcaaacatgcctatgtcaaggtcattgggttcattgcctcacattccccagagcaatcaccaagtttcctccacttggtccaagagctggtcctgaacaatcaatggaggctgggagttcccaggagttacccacgcctactgctagaagaccttaccttgctggggtcagccacgctgatcaaggcatcatataggttctctagcctctcccagttctttccacacagcaccagccttgccccacctgtgtggaacacccgagcacactctgtggggaagaaggaaacagggcagggcacactgtgtggatggagccactgacagtgaaccccctctcttgggaactcatgaattcaaaaaactcagaagtcttagcaccacgaggtcctttaggggtcacttcattgaactccctccccgggctggaatttttgtcatttccagcctctgcttagttgcttccgtgaaagtgagctcatagtggagtgagacaactcctcctttgttagaaagttctgattattggaaattcttccttacactgaacagaaggatgaacctgcccacctggtcccccaggaccgcagccctagagatatctcaatctaaagataatggagacaaaccaccatgttttttcaaatcaaatgtcaccagtttcctccacattttctctggggatagacacctcagccagggttctttttatttaaaaagtaaacctactttctgtctaattaattttcctctggactgattcctgactcacccaatatagcattttctcaactaagtgttacctggtagacatacagaattcttgtgtagcaataccgatgatacttaaaagcaatagaagctcacagatttggagagtttgcttgctgtaggaactgttgaaagatatgtacatatctcttacatatcgctctagttcatttaatactcacaataaccttatgagacagtatctttaggttgggttcctaggaagcagactctgagacaaggattcgggtggccaggatttactgagggcttgctcttcagagacagcctatcggggagtgaggtcatggaataggggccaggagaggatgtggtctcaggaaagtctagctttggtttgatccaggaaagactctggagtctaaactccattgcagagctggaggcaagaggatcggcctttgtacaccagtgtcaatcagtcactgatggggctgccctctctgggggtgcgtgcataggctgtgtaactcctaggtagggcagcgtccactggcagaggacaagtctttgggaaaggaggcatctgcacgccatttgcaatctgcatgccatttgcagccaactcttacagtgcctgggaaatggatgaactgaccaaatacagggatctggaagaggcaccaacagcacctactgcagggaagaacctatcattgtctcatttacaccatgaagtagtggactcagactggctgggaacacggaaggacagcctggcagcctggtgcccagtggaggctgaatatcccgagtgttgtggcctccaagtgaactcagggttgtgtgattttctccagcagagccaagaagcctgctgcaggtggagagaagggacctgctgcacaggacagttggccagggtttggtaagtgggcatcatggacagggaaactgtggtattggagagatggaggaattgagatgctggactatgaagtctaaatcaggtgggagcaggagtgaaggcagaaaaggccaagagaggacccaagcagagagttgtggggataagaggtctccatgaggccttaaaacaggtgtactgggcatcctgagagagctgggaggagggctctaggagagctcagtctgctgacagagggaaacccgaatccagaagtaactgggttaacaatgtcaccttgaattgttacggctgcagagagggaagattcctctcaatgcaagtgttttattgagaaagaggctgtccgtgatgagtctggatgacaaaattcaataaagatgtcaatttgtctccaagttaaattgatccagtaaatcaggatcccaacgggtcttgggaaatgacagaaagatcctacactttatatggcatattttgcacactttaattggaatactcaatatgaaggaaagcaaagaacatgttgaaaaacagttgttaaaatatattgtaaaactacagaaattaaagagttagcagttcaagtctagatagaaatattgataataaatagagtcaggtattgaggagaatttagtgtatgataaagttaacatgttgagccaacgggaaaagaatgtattacgtaaaaagtgggagctgggcgcggtggctcatgcctgtaattccagcactttgggaggccaaggtgagcagatcacttgaggtcaggagttggagaccagcctggccaacatgatgaaaccccgtctctactaaaaattcaaaaatttaatcccagctgcttgggtggctgaggaagaagaatctcttgaactcaggagatggagactgcagtaaattgagatcatgccactgcactccagcctgggcaacagagtgagactctgttttttttttgtttttttgtttttttttttaaaatggtatttgaatacctatctgggagggaaaaaaagctggatgcattacaccaaaatatactaagtagtgaaatataaaaacataaccaaaacagaaatagacgaagatagagatgaatatatacccttgcattggggaggactcctgagcatccattgaaagaaaaaaaatcctaatagaaatgatttatagattttacccttttaaaaaaaaccttcttggctgggtgtggtggctcacacctgtaatcccagcactttggtaggccaaggcgggcagatcacgaggtcaggagatcgagaacatcctggctaacacggtgaaaccccgtctctactaaaactacaaaaaattagccaggcatggtggtgggtgcctgtagtcccagctacttgtgaggctgaggcaggtgaatggcgtgaacccaggaggcggagcttgcagtgagctgagattgcgccactgcactccagcctggggaacagagtgagactccatctcaaaaaaacaaaacaaaacaaaacagaaaatcttacagcaaaacaaaaacgaaaacaaaaaacacccataagtaaaggacaagacaaatttagaaaaagtgtttataatctatatgtcagaaaagggttaatttgatatgtgaagaactcttacaaatcaattagaaaaaagataaagttgctaataaagaaattggttaaggagatgagtaagcaactcacaaaagaagtatcaagatacagaaggtgagtcaataccagtaatacataaatgcaaactaaaacatggggctaattttaatctatcagataatcaaaaacaaaattggaaatagtcttggccacattcttggccactgtgaataacaattttgaagccctaacaactgatgttgcagaaattggtctattgacatggaacgaagttcgcaatagagtaagtttaaaaataattttaaaaaagattcaaaacagtgtgttgaatacgatgccataacgctgggttgtgtgtttatgtatgtaatagaatagtaaatctacatatctatatgtaaaaataggttacattagaagtttaactgaggcactgagatcaaatagatataaagatataaattcctaagttagatgccagtccaagatgctgactttcaaaggaaattttaaaaacatgtcatatgaagttcagttccctttacccacaaataggacacaaatgaatcaaagaagaggaggaatagcggggacttcgaaggaggatcgcctggaaagaatgttaggtgagttttcgcccatgggcccaggctggggctgttttcctttgcctccatcccagagtgaagggcacaggaggaatcaacagaacagcacagttccccgcagccaggagcccagcttcatgtcttatgggcaagatcctgggctcagccaatgccctgagggcagagaaaaggaaaactgggacctcttcattgggggtggcctgcagagccaaagaagtcacagccaccaatggccaaggtaggtcatgagttggttgagagctcgtctgaagactgcccaagaggacctctcagaagggcagtggaactccaaaggacagggttggtggggagtagactgcccgggaaccaggggctaaggagggattgagtgagtggagaaaaaacccacatctcccatttcacagaaatgaataatcctagggaggcctctgaaaggcacatgaaagtgcccacgagagaaagattcagacccagttttagacatgtgccaggcccatggaccttgaagccatcttatagcactgtcagttgggtgagagtttttctcgctctcctatcttgtctccttccagtccctgaggccctagaagcctcagaaacagcaggaagcttccctccaacttgcactagctgtggggaggagcagagagggggaagaaagttcgaattcaatgaaaatggacatgttatcaggtattagactgggcatcccaattccagaatcaatgctctgtttcggg[156 bp omitted]gtttctactaaaaatacaaaaaaatattagccgggcatggtggcaggtgcctgtaatcccagctactccggaggctgaggcaggggaatcgcttgaacccgggaggctgaggttgcagtgagctgagatcgtgccactgcactccagcttgggcaacaagagcaaaactccgtctcaaataataataataataataataataataataataataattaatcagaaaagtcaggaaccgcctgatttttttttctcaagctgcagaggaaggactctcccctctgaataaatttgaggtgtactgtctcacgacacccttgattcatgctcgctcatgactggttactcacataagcatccccctgaaaggaaatgaaggatgtgttcacacaggatgtccccaagcacgtggggttctacgtgtgttttgtgttctttttacttaaaaaaattcttttaaatatacatggcttttataacagaattcactaacagaaacttccgtgggcagcagaaagtctagtctttctgcatttcagctgtcattctggagcagaatgatggttggatattacaaatgagagaagtgaggttcagtgggttgaaatgaatcacccggagtcccacagttggccagcagggaagccaggatgtgaaccccaggagtctgacatccagatggggagtaacgcattctccacactaggctcctcttggccaatgcccactgctgagaaagggacacgttgagggtgcattttcactcctcgctccctccctctcttgatgatgagcatctatttttttttttgagatggagtttcattcttgttgcccaggctggagtgcagtggcgtgatctcagctcactgcaatctctgcctcccaggttcaagtgattctcccgcctc[134 bp omitted]cggtctcccaaagtgctgggattacaggcatgagccactgcacctggccagagcatctatttgcagcagggcactggagcaggtgaggggcctgtgagcaggagccagatcaaacctctggccttggccttgttagaacagacagctaggagcattcttccccatcactccatttcccttcgccactaacaccttgccttgcccaggtgtgcctgggaggctggagcccagtggcgtgctcagtgcctcggtgctactgcagccaagcctagaggtgctgctcctgaagaagtcatttctgctgaaaccaggcctttggtatacccaggtgtccttatttctattcttttatcagctcagcaggtatctcgcatcgagcactttggtaccaggcttttctttttcattcaataagcataaattgagcccttctttctgtatttcatcaatgtcagatgccatcgatgatgagctgttgcctgatttcagagataataaatgacttttaattttaattttaatttttttggggacagggtctcactctgtcgcccagactggagtgcagtggtgtgatttcagctccctgcaacctccgcctcccgggctcaaacgatcctcccacctcagcctcctgagtagctgggaatgcaggcatatgccaccacacctggctaagttttacattttctgtagatatgcgggggtcttactatgttgcccaggctggtctcgaactcctgagttcaagcgattcacctacctcggcctcccaaaagtgttgggattacaggcgtgagccacagcgacattttaaagggtggcctatggggattgtaagatgctatggatggaaagacaatcagtctgatttcagaaatgtttaaaggacagaaactgcacctttgaggtgataacacacaggcagggctgacattcagctgtatcctctgaagcagctcaactgcaggggttggctattccgatagccattctttttttaaaataaataaataaattaattttttgagatggattctcactctgccacccaggctggagtgcagtggcatgatctcggctcactgcaacttccgccttttgggttcaagcaatcctcctgcctcagcctcccaagtagctgggattataggcaagagcccccacccccagctaatttttgtattttcagtagagacggggttttaccatg[138 bp omitted]acaggattccccgcttggccaaatccaggaggtttagagcgagggctagatgccccagtctttgtctgtctgtttgatttccctagtaaacaacttggtgtggcaatccctgctgctcccgatggcacccatggggttcgtgcaggttccgtggcaccagggtgtgcagcggctgtgcacagcctgcatcatccactcagtgccctggacttaagacatgcagcaatgggagcctggaatcactgccgtcagcagcgtggagagctaggcatttatttaaggtcacacacatccagcatctcaagttactgctaagtaccgggactttatttttttcttctttgcatttctttccagggtgggtcaatgagatatagtaaaaaaagaacagtgacagtagacacgacaagctaggccatgaggtcctgcaaaggctgtttccctcatgagatgtatttcctgggtgcctgatttgatcacgtgtgactacaactgaatgaggtgttttaaaaatgaatgagatgattaaaacaaacacacatctctcaacgatcagtaaaactgtatttctacctaataagacacaaaactagcaaggctacggaagaactgagcaacctccccaacaaacaggatcgaatccacatttgtaggacaacggcagaacgtacattcttgtcaagcactcgcagaacccatatcgagataggtcataagacaaacctcagcacatttaaaagaatcgaaatcatacagagcgtattctccaaccatgttggaatcaagctggaaagcaataaaacaaatttgcaagaacacacttatccaaatgagggccttccctgatcacatgtcacttttagaggttattcattaaatacacattttctgaggatgtcaaccaagcattgagctaggtgctgaggctgcctgggtgaacaaaacacaggctccagcaccaggaagcctgtatctagtggacccactgagaaacacacagatacagcatgagaaatacactaatgtggtgtgcacttacaaggggccagttaagaagctggtccacaaggaccattcaagaggaaggagcaattaaggtgtcaggacaggctccagggtagaggccgtatcagggatcgcatgttagcagcctggtgcaatgccagacaaaggtgcgctatttggagagcaaatttttcgcaaagccttctgttctgaatagctttaggtgggcatctcttttccagctctccagggcggcacactccctgttgtcttttgtctggtctgattgacagatgtgtgtgccctggcttgcccttgaagaaggagtttgagtttgtgtacctcgctcccttttgatacaggatatcctctctgggaattgtgtgtgagactcatctaggggccacttagagagcctagtctatctgccttatgctttgttttttatcttaacaagatgcacctgggtcgatcacccactgaaaactaagccatcctcaaagcgtgcagattggctcccattgggatgccgaagaggctaagcagcaggctctgagaaaattctcagggaggttacaaacgttctcacgatggcagcactatgagagtaagtgcccagccccccagagggactctcggggcaatgctcaggacatagtggactcagtggacacttactgagttactaatgaatgtttggctgtgtgggatctatgctctattaaaaataataaaaacaacagcaaaagttgcactaactatgtaacatataaagttgtactaccattgtctggaaggatagagtcagaatcttgcaaacttaaggacaattacggcccctcatgtcatagatgtcaccagcagaagggcctctctgaggtgatataattcaggagttgcaaatgcaaatgccttcaatgccagaaagtgtaatgattgaaagaatcaggccaagtgtgatgcaatagggatgggtggggtgtgtggcccactagcgtgggcatgttttgcctatatgtgttcatgatcatcattactaacccttgagtgatatccactgtagctccaggtactgttctaagtgctatccatctatgaactcgtttattcctcacaatggcagcatgaggtagagactgctgttatcctcgccttacagatgagaagtttaaggcagagaagtgaagtaaccagctagtcattgctggagccaggaactgaacccagctcctgagtctgggctcacaaccagtacattgccccagctaaaggctttgaattttcaaaatttctggaaaccccatgaagccaaaacaaatcacatctgcagaccagttttagcccttaggctgtgagtttgcaaccctagatattccaccaccctcatttatcaggaatctgcagcctccaaaagatgggaaacttgctggttaatgatagaagctgggagagaacacaggatcgatcccctcccaccgagcaggtttgcccacacagcgccctgccgccctgccaccctgccatcctgccagtccctgggggcagaaatgggcacaggtgggagcaaagccagcttacccttgcccagtcctgagatggcatcggtgatcaccaccactttgttctgcacagctgactttgaccacagcctggacacctcttggtaaatgaagaggaggccgctgattcccagcagcagcagggggagcatcagcatggccatgactcccatcttgttctgggggacaacggagtaaaaggggattggctttgcaaagagacgctgatcaggactcccagggcagggggaggcccaaggctgcagggagctcagctctgtgcaagcctccaagctgaacacccagtgggcgtgctaatccccaaatgttcaacaaataggaagttactcacagtgtctccgaaagcagaccgaatccagggggcctgccctccccagtggttaattacaaacttaattaaaatgggtctgcatttttggaagaaaatccatgtgttaaggccacttgcttgggccctaatggttatttatagctttcagttgcactaaaaggctgtcagggtaaatatagtgtctattctgatattcaggaacacatgctggccgggtctgatttcagggctcttgccaaagctctcctggcttgcctgagtattagaggtttcctctgcagtttgggactgagcacgagggatccaaacctgggattttcagcacaaacatccttgccctcacttccggtaaccctcgtaatcaggtagcttccaggtagtttggatgcatgtggcagaagaccatctggcctttgctttctaattggagatgaaaagcatagaaaactgctaaacagaatgaagccttttgcagaaagagccactgggaggtgtgacaggaaatatcagaaagagcacactcttgagagtgtttctcacctctctgagccttagcttccctgtctgtaaaatgggcaggaccaatgggaggacaaaccatactgcacagtgtgggcctagcatagatcccgggccgtaggaaggtaactactgttatctttagcggttgaggatactaagaatttatcccaaatgtgaaatattttcattacataaggaaactcagtaggattagaactggagagacagaaacccagttcaagtactggagccatcccaaaccagaaggccaatcacaatcaggtcctaatttgtgcggtaaacagcattgagccaatcaggagtaggactaagagcagtgtgtgtgcatgtgtgtgtgtgcgcgcatgtgtgtgtgtgcatgtgtgtgtgcgtgtgtgcgtgcgtgtgtgtgtgcgcacctgtgtgtgtgcacgtgtgtgtgtgtgtgtgtgtgcgtatgtggggggggtaaagaagactgtatttctttcttggaaattagaaataaccaggaagattaaaaaagtcccagaattttattgacacttaatgtacatattagaaacacacacgtaaatgtagagcttgatgaatcttcatagactgaatatattcacgtgaccagcatgcagatcaagaaacagaacattgccaacatgcctcatcatgtctctctccagccctgagggtagctacttcctaacttttaaaagcgtatatacagttttacctgtatgtgtattttctttgctcaaacaacctcttgtgtaaagtttttctttttttttttttttttgagacagtcttgctctgtcactaggctgaggtgcagtggcacgatctcggctcaccgcaacctccacctcctgggttcaagcaattcccctgcctcagccgcgccgagtacctgggactacaagcccccaccaccacgcccggctaatttttgtattttagtagagacgaggtttcaccatattggccaggatggtctcaatctcctgaccttgtgatccggccacctcggcctcccaaagtgctggaattataggcatgagccaccgtgcctggccaagttttttttaaataaattattatctgtgttcaatgctgctgattggtcaagtaacgtagggtctgagaagtgcctgtcagctttagtgatgtggagtcattggtgacattgacgggcacctctgtgtgaagactattgtgtggtttctgctctccctcagacttactgtcagtggctctgtcatgagccaaccctgcaagatggttcctgactcatccaaacccccgggacttgatgctttgaaagcatctgcctacctggctatttggatgatggtctcgacaagcctaaaagatgctccaagtttttagcctacaagttcctcagaacttggttgaataacactagacaacttcgattttgcctcatgtccctgatgatggagaagaggcaggacaggatggtgggttctttgtcatggaattatgtttgaatttggacaaagttccctgggagctttagttgaactaatgaaaactcagatctactcaggggcatggggcttcagatttttcttttttttcaatttaattgccacagggcagataaggaatattccaaccaaaacatactttgtcgtccacaaagagattctttctccaaacacctgtctgctttactattctatgtaggaaagaatcctgaagttttgcctaactctgaaattatggtattttctttcttcttttctttcctttctttgctttcttccttcccttcctttctctctttctttttacttttcttttcttttttttttttttttttgagatggagtttcactctcattgcccaggctagagtgcagtggtgcgatctcggctcactgcaacctccgcctcctgggttcaaacgattctcttgcctcagcctcccgagtagctgggattacaggctccccccaccacgcccggctaatttttgtatttttagtagagacgggggtttcaccatcttggccaggctggtcttgaactcttgacgtcatgatccacccacctcggtctcccaaagtgctgggattacaggtgtgaaccactgtgcccggccaaattacagtattttctaattcaagaattgagagctaagactgaccaggatgaatgcatatttggagttggaggccatcctggaaaccctgggatgtgaaagctgagctctagatcagagttagtcccagcccatcttctcctctggggcctcttcaatctccttggtcccaagcagaaccactcctagcttcaaattgcagatcttgaaggctcggcacctgctcatctctgcatcagagaaaaatccaccctcaatggactccttccagctttccttctccccataaaatgccccaggcccctgccctgtgacagcttcacctagggaggagaggggggaaagatttgttctcccactctgacaaatgtggctgtgtcatgagccaaccctgaaaggtggttcctgacccactcaaactccctagactttatgacccacccaaattccctagactttatgctttgaaagtctggagttggatggccctgattctgaatctcagtgctgcttctgacttgtgtgtggcctcaggcatgcacctaaaccttctgaatctgatggccattgaatggaagtgggaacactcatattattacactcctcacaccactgtgtagaattagaatgtaacaggtgatgtgtacatcaccttgcgtaggcctggcccattgctggggctgatagcttctgtttctcctttcttcctggcccttttattcctagtctgtgttggttctcctcattgcctttccttattgaaagtcaagctccactcctgaggacactggacaggtttggggaaggattggtcaagagttttggaggctactctcacggaatatagaaaaatgacatcactgtaccatcccctgggggccttcgaggtgcagtaatattcctggaactcgtaggtaaaggatgcaaggactaaacaaggtaatgtgtgcacatggtttttcttctttcagagacagggtctcactctgtgcctaggctagagtgcagtggtacaatcatagctcactgcagcctcgacttcatggacttaagcgatcctcccacctcagcctccagagtagctgagactacagggataccaccacacctggctgctgattttattttattttatgagatggcatctcactctgtggcccaggctggggtgcaatggcacgatcttggctcactgcaacctcctcctcccaggttcaagtgattctcctgcctcagcctcctgagtagctgggattgcacacacgcgccaccatgactggctaacctttgtgttttttattttttattattttttattttttagtagacatggagttttaccacgttgggcaggctggtcttgaactcctgacctcaaatgatccatttgcctcggcctcccaaagtgctgggattagaggtataagccacagcgcctggcccctggtgtttttatttttattttttgtagatacaatgttttgcattgttgcccaggctggtctggagctcctgggctcaagggatcctcctacctcagcctcttaaagcactcagattacagacagatatgagccaccgtgcccgaccctacacatgcttttataaacagtaaatcgttgggtcagtatcatcccttgtctccaccctgcatgttccccaggtgaaatgcaggtcctgttagcggtgtcttctttccatcaggaccagcacttgctttgctgcatgaagctgcttctactccttacctccttttggaagagtgggcgctctccatctttgagggtgtttgtgtataggtggcagggggcttgtagaggaggaagtgaggatgacatgagatggtgggttgttggactagcctgacttcttaaaaacatgtctgagggccagga[174 bp omitted]gaggcaggagaatcatttgaacccgggaggtggaggttgcagtgagctgagatcgcgccactgctctccagcctgggtgacagagcaagaatccgtctcaaaaaaaaatatgtgtctgatgtgtctgagatattatttagccttaaaaagaaggagattctgacacacacactacagcatggatgaaccttgaggacattatgctgagtgaaataagccagccacaaaaagacaagcactctatgattctacttctgcgaggtacccagagtagtcacaaccatagagacagaaagtagaatggtgggtgccaggtgctgaaggaaggaaggatgtgaagttcgtatggagtttcagttttgcaagatgagaagttttgtggatggatgatggtgatagttacacaaaaatgattaaggtggtaaattttatgttttgtgtattttactacaattacaaaaatggaaaagacggtcttacctcctttgaagagacaatcccggtataagacgatgccgtccacgtgattcaaattgaaatcatacaagacaacttcgtatgtagtttatggctacatctacatttaacaaatatgtacaactatgcaaaggaatggtgcacacaattcctggatggtggctacttcctggaatagagtgaggaggaagggacggtgaggaggacttatgtgaggcattagtggtatttcatacatttcactccttttctttttttcttatttatttatttatctatttatttattttactttaagttctgggatacatgtgcggaatgtgcaggtttgttacataggtatatatacatgtgccatggtggtttgctgcacctaccaacccatcatctaggttttaagcccctcatgcattaggtatttttcctaatgctctccctctccttgccctccaccctgcgactggccctggtgtgtgatgttcccctccctgtgtccatgtgttctcattgttcaactccctattttttgtagagaggggggtctccctgtgttgcccaggctggtcgtgaactcctgggttcaaggcattctcccactgcatcctcccaaaatgctgggattataggcgtgagccactgcacctggtctcttttctttttaaaaagagagatctgtggcaacgatgacagtatttacttctgtcatagtttccttatattaaatagttttctatatattgaaatatttcataattgaaaagaaaacttaaaatagagagagaaaattagaaacagatggatcctggcattcttcctacttacctgtcctcccaaatgctcatgtttttaaattgctcttttttttttttcgagacagagtctcgctctattgcccaggttggagtgcagtggcacgatctcagctcactgcaacctccgcttgccgggttcaagtgattctcctgcctcagcctcctgagtagctgggactatgggcgcgtgccaccatgctcggctaatgtttgtatttttagtagagactgggtttcaccatgttggccaggctggtcttaaactcctgacctcaggtgttctgcctgcctcagcctccaaaagtgctgggattataggcatgggccaccacgcctagctaatttttgtatttttagtagagatggggtttcaccaagttgatcagtcaaattgctctttttcttttctcccaaattttcattgtgcagatgttgtctcgctcttgtgtcatgtggcaactcaaaaaaacctgagttcctcatgccccacttttatattctgtctttcagatgcaatgcagacttaacacgagtaactggcgatattggtcagcatctacatgattgaaatgtcctttaaccttcagataatttagcaattttctgatcttcccacaaccctccacctcaccccacctgccacacaacactaacttgtttctatagctgaccccttgagggcagggcagagccttgtatctcccatgcctcccgcaccatgctttatatacacatattcttcagagacgtttaatgagtcaaaaatatttacatgagcaaacctaattcctgtctcattaaataggccaactgatgttttcctggtcttcagagaagtccctatcagcccagatggttccaagagggttcaccagaaaggcagttaagctgtcagtgtcatgcagactctgagccagtctaataagtttagggctgaattcacgaattctggaaaaatagttggcttcctggagtcagactaccgcattctcagttcttcctctgtaaacaccttgttcaattcctgcccagccaccttgagtcagcggccatctttctttgctgcctcgtaagagggaacatggactcttgctcctgagttccccaaacctggctggggaagatctctcaggaccagcgctggctccatttaatgatgggtttgttgtttagaacaatggacccccaggagactgccttgtctgtgggcgtattaagtagacagtagacccggacaactgacctcaacgggcattctctttcccagaaatgaaaggagttttgattccttccttccaggagaaatggcacagttcccagaacattgtaaacacctgataaaattcactggctgattatctaaggactgatgactttcaggctaaaaatgattggcgggtttgcactcacttgatcctgcctttctctcagacacggtcactgaacctttcaccagtgcttccccaactcattgacaaagactcatctccgcagcgtctctttgtcacccacaggacctaacagggcttgcactcggcagatgctagcagcgaatctttccattgtactaagtgccaggcgtggttctcagatcttcacatacactaacacacttagtcctcacagctctcaaaataggagggccaggtggggtggcttacacctgtaattccagcactttgggaggctgaggcaggcagatcacctgaggtcaggagttcaagacaagcctggccaacatggtgaaaccccatttttactaaaaatacaaaaattagccggatgtggtggcaggcacctgtaatcctagctactcaggaggctgaggcaggagaatcacttgaacctgggagatggaggttgcggtgagccgaggtcgcaccactgcactccagcctgggcaacagagtgagactccgtctcagaaaaacaaaaaaaaaaaaaataggaggattgtttttacaggtaacaaaactgaggtgtagagagattcagtggcttgctcaaggtcaaagtgaggaaccaggatgtatatgcagattgtctgactctagagtccatgctctcaatcatgagctatattacttcccatagaaagctaaaaaggagtctatttgacagtgtctgtgtgtgtgtgtgtgtgtatacacacatgcatattcatatgtttacatatacatatatacaaatataacattttccatttgccaaccgttgttctagatgctgagggtacagcgaacagttcttgcatagaaaaatgtagcatgtatgagggggagaaagatgaaaagagatgacttcattataccaaatgaagatccaactgggtgtgtattgcagcaaagatagatgaaatgaggcgccttgcttctgtttcttgaggtggagcacggatacctgggcgtgttcactttctaaacatttatgaagctgtacatttgtgatttgtgtacttttctctccgtgtgttatacttcgataaaattgacatttaaaacatttataaggaagcaaagtgccttgtgagctcagaggatatagcaaggaatggtttttgacttgagcctcagtgaccagttgccttctgtcctgccttggtgtctgactgaccactggctttcttctccagaggccaagtgtatcatctgatgatgccagctgccctcacatggctccaaaaattccttctttctttccttccttccttccttccttcctctctccctctcttttttttttttttcagagttttccttttgttgcctaggctagagtgcaggggcgcgatctcgactcaatgcaacctccgcctcccgggggtttaactgattctcctgcctcagcctcccgagtagctggaattacaggcatctgccaccacacctggctgattttttgtatttttagtagagatggggtttcaccatgttggccaggctggtctcgaactcctgacctcgagtgatccacctgcctgggcctcccaaagtgctgcgactacaggtgtgagccaccacgcccagcaaaaaatttatttctttacccatgtaacaaacctgcacatgtacccccactctgaacctaaaataaaaattgataaagaaaataaataaataaaaataaaaacttgtccaaatagtttttaaaagtttatttcttctttggcatcctcagccacagtgttcacaggtgtttttcacaacagcgaattcagcgaagtctctctccagtgtatttcattccctgtaagatgagactttgacctgatatcgtgacagtcacacaggacctgcctacatgaatacatagggatgaaaaaccatatgaaagaacctgcacactgcaaagggcagaggcttgtgggtacaaactctcctgctctaggtgagcacatggcccagggaaccccagcagacattctctgggttgggcttattccagcaagaatccattgtctatctctcatatatgcttagcgcaatgaaacacaaaattccacagaagcagcatttgtcaggcaggtgctcaccttgagccacaaacacgaaggtagctggattttttttttcattttttttatgacagtataagtgttacagttcagcataaacagatttttattggatttttttcccagaaatgatatgtttacaaaacacgtgaatataatttttaaaatggatctgagcaaggacatattgaaggttgttagagtttgcagtccctttcttttctttttctttttcttttttttgagacagggtctcactctattgcccaggctggagtgcaatggcgcgatctctgctcactgcaacctccacctcccaggttcaagcgatttccctgcctcagcctcctgagtagctgggattacagacatgtgccaccatgcttggctatttttgatgtttttttttttttagtagagacagggtttcaccatgttggccaggctggtctcgaactcctgacctcaagtgatctgtctacctcggcctcacaaagtgctgggattacaggcgtgagccactacacccaccccctttcttttttcaaaaaatcaaattatgtgtggaacaacctgtggcctgaataacatggtagctggacatgggatgaattgatacaatattgcagatgactgtattaggaatcctgcagcccaccactgcctccaacaagacctgcatgtttggtaatgtttatttttagaagcaaaagtggctggcgatttaatttaagcagaacaactcaaacatgtgttccacttaaactaagataagatgtcattccatttgactgtgttttcatttctatcattcgactgtccttccaaactgattttactatgagtagaaacacaaaatttccaagaaaaaatattttaaaaaataacaggaaacatattttgaaatttctgtcttcttgattcaaatgaaaaagaaagtatgacatagccacacatactttattgtgtgtgtcaattaggagaaaacattttctggatttttctgtcaacaaacctatgcggacaacacattttgcctcccttgtagttaaaaagacttgctttcctctttcttcaacttctcttcccttagtactggcatcctccctgtttctttggtatccttatcaaattcactgtcattaagaagctctcttttatactagagtgtcaatggttgatatcttcagtaagcattatctcacttcaaggtactggcattttaacaggaatcaaaggctaaagccaaaggtgtttagtaaaaggtgagatgtggaggggtggggatggaagctttccctggacaacaatctcctgaagtccaacccagaggcagggtgtacattgtgagtgtcagtgcctggcttgtttgcctgtgcggatgtggcagccatggacactggctagcatatggacaccttgcctggggcgcctggtgggaggtgtccagaaacattcctgaaggcttgttcagcagggcaaggagcagctcctgttttccaaatgctctccgaagcctcgggttccaggaagctgtgttgagagtgccgactgccgttctgtgcctgctgcttctcggtgaattccaggcgggctgccgtgaacctgctcatggccgagaccgacacagccaggcagagggcgaaagaaccccaggcaaggctgtcaacagaaggcaccgttaggaaagggctgagggctgtgattccaggacttcctgttttctccagactgggggtcaatctggagaaaacaacagctcctcgttctactcagtttggacctgcattttggatcacaaatcccagagtctagtcaacgtactgtttagcccaagggttaagagaatggattctggagtcactgtgctggctttgcatcgtggccccaccttgtattaaccatgtgaccttgagctggttgctttacctctttgaatcagttccctcatctgcaaagctggaataatattaatgctgccaccagggtggctgtgaggaattcagtgagtgaatgcgtgggaagtattaatacttagtatagcatctgctgcatagaagtttccaga[132 bp omitted]aacctctgcctcccggttcaagcaattcccctgcctcagcctcccaagtagccgggaccacaggcatgcgccaccacacccggctaatttttgtatttttagtagagacagggcttcaccatgttggccaggccggtcttgacctcccgacctcaggtgatccgcccgccttggcctcccacagtgctgggatcacagacatgagccaccgcgcccgaccagcatcattattcttatatccccatccaggctgtaagcctgttgcatactgagatgatgggctacacttttcatccttcaaagaacccagcactgtgttgggaacatggtaattagcatctgctttataccaaagggtgttcaaatgtttgcattattatgagataaagagaagggctgtgtggtggacaaagaacaacctagagaagaaaagcaaaatgtagggctaaccagagacacttcccaatggataataataagattaacaataataaacagtcttgtatgtatgccaggtgctgtgatgggcaccagattatctaactgaacacctcacggcgaccccctgatggaggcactataattatctccattttacagatgaggaaactgagacacagaagttaagcaacttgtccacgactaccatttagaaagtgggacatcctggatgcggctgcaaaccctgtgagtccagatactgctggctgacttgcgagactttgctgcctcctgatgctgtggactcggttaaccaaggacacatgtcaaggttctggtttgggcctggtcttgcttcgtgttttcattaagtaggtgattattttggtttaaatgagggcagaaactcattgcatctctccacacccccactgaaacgagagtaaagggatgtgtactagtgtgaacacacaaggacaaggagaattggagaggagacatgagagtacggaaacggctgggagagggatgactaatttatggagtgagggatgcgacacagaaagtgtctgcaatgagggccacccacaagacaagaaggatgcctgttatatcagcactgctgaatccttgagaggtgcagaaccttgaggcacaaatacggcacaaaaaatgcagccctttccccagtctcctccttaccacaaacactccatcccacctccctttcccccagaaaagcaaagttttattctctggagaaggtgaacggaaggaaaggctccggattcagagacagcaggcccattggaaggcagggaagggggctggtctgaaaatgggattgtatggaaatctgcacaggagtgggaagctgtccagccctttcctatgcctaacctcagaaattatcagccaggcatgtgagcttactccacttcctgcggatattggatgattcccttctgaagacactgacaggttgtggaaagaacctctacaaaccgatatttgtgtgtgtttttgtggagtggaattccaagataaaatagatggtgccatacccaatcacatgccaaaacaacaacaaaagagcctaccagtagataaataccaaccctgctccagagcttccaattatccttgacaatcaaagatgccaacgtttgggggaaaggtccaacaacaaagcagggaggggaaagaattctaaaggaaagagataacacaaggaacaaaagaaaacagcaacaaaaaccaaacccttcgattaatatcctcagaggaatatgagaaaagaagatgctgtatcaataaagcaagatcaggatattatgaaaaaggaacagctggaaaacaaggaagagcttggaaaattaaaataagtccaaaataagaattcaacagaaaggctggaagacaagtagagaaaaattttcagaaaatataataaaaagagaaacaaaatataaagaaagtaataagatccttgaataataaacccaaaagacctaatatctaactaacaagtgttttctaaaaggagaacaaaaaactgacgaaaggaaataatcaaagaaataatacaaatacaaaaatcaccataattccaggacatgaatattcagattaaaggctcccccctcccccaccccaagcacatagatgaaggatgaatgtggagaaaagaggatcctcgccaaaggacatcatcatggcatttcagaacattggtcataaagagaagaaaataacaggccacctacaaaggcacatgaatcagaatcgtgttggactcttgacagaaactatgaatgctggaagagaatggagtacggccatctaaattctttgggaaaatgatttccggcagagaattctgcactgtgccaaacaatcgatcaagtatggagtattgaatttccaggcatgcaaggagtaaaataatttatctctcattggatcctttcttaggaagctgctgaaggatgtactcccagaaaaggtaaactaaagaagataattcaatgggacctaagaaatagcattccaagataagggagtggcgcagggaagtctcatgatgatagctctagactgcaacgagcctggaacagggcaggaagaccgagggctttgggggtttggaagtaaaactgagaagctaatctgattaggtccaccaaacctaacctgccctgcttgcttttggttgcttgctttctttcgtccccatatagctaaaagccacgccactaaactcctggcttccttacggagaacatttctgatgtacacgtcaccatggtaatggctgcttgtttttcaggaacttggggcagctcctatccagttcaaactggttgagaccactgatccttcagctgatcctgtgcaagtgcctgagaggtggccttttgatgtcagaaagccaaaaactctacccttagaacatgctaatgctaccattttctgaacatgcatcttgtgaagagccatgaaccctgactatgcttgcacagatcactagtgactttatttttccccattgccaatcacctttcctcttgccttagaccaccctgcttctctaacccataaatatccctaagtcttatcttcaggcaggctttgagagctgttctcccacctccttattgggctgccctgtgaataaatgttttatctgccctgtgaataaatcttttgtaagacccatcatcacagtaactggtttactaagcacaaacagaatgaacttggtgggtatcagaagggtggcacagggagagaatggaattgatagattgttacgcttagtactatttgatttttaacaaccatttacatatgcttcttttgctaaaaattaagtaattgaaagtaatagaaaacaaaaacaaaacaaaatgatactggaaacaaacagaccattcttcaggctcctttagtgtttggaatttgcttctatccatagcaaaaggagggcagtacaaattggccacggttgagaacccacctacaattcatctgagccctgctgcaactacactctcaactgtgtaaggtgccagtgatagcccctcagaaccaatagcactaattcaaaggggggtagctaagtgacaaacaggtgaagggacaggtgcccagagaaacatttgtaaaaattaacatcttcagactgggaagacgaagactaagaaaagttcagactctaacaactcacgaagcatatggctcacagtaacacacatgcgttcactgaatcctagaatagtagggtgagggagtgagccctgaacgtgttatgtgttttacaaagaggaaagtaacataagaggttgttatataagatgaaaatgtaagttatgtacatctatttttaagatacgatatgcttcagaggtccacatcaaagacaacccctgtggtcttggataatatggtcgagtcagttagagacagaattcccatgtcgtgaccttgtctttgcattagaaacaggggctgggtctcccccagttgaagttatttattaggagttatagatcaagacacttcctcccacactgtatttaagaactgatcatcaacaacgtctcaatttctcggggactttactatgtgcaaagagttttataaacataatctctttaaatccctatacaaacatttgaggcaggtatcctcactttatcgatgagggaattgggctacagatgggtcacagaattaacccaaagtcacaatactggcagatgccagcactatgaccaaggttggtcatcctacaaaacatgtgtatgtttatgtgcatctctcctgatcctccaggacttcagcaccatgaccaagcaacttaccaatatgaccagccatagtcccaggtctgaggcttccaatcttctggtccaaggttcacagtgatttgaaaaatggttgtgtacatcatgtgggccaccatgcctagaagccctgcgcaaggaaagctctgtgagtcacagctaagaagacacatgatggaagaactctacgcggtgtgagttggctgtaaggagctctctagcattcataaagtccttttgatgtatctgcatgtattcatccttaaacattccgctggacatctctttcccacaattgaaactgaagagacatccggaaagacacaatcggggaggacctgtcagaacctgggtaggagtctccatggcctggttccttcctaagaagatcagaaattggattttatcatcccattcgctgaggataagacttgagggaggtaggcatggtggcatgcacctgtaatcccaggtactcgggaggctgaggagggaggattgcttaagctcaggggtttgagaccactctggggggacctctgattgagaggttccaaataaataaataagtcccaaaataagtaaaataaaataattaaaagggactttaaaaaaaggacttaggaaagatgcattacacttatcaagcacaacaatgatgtacaaattggcctgctacatgatgaacttaacatgagtaacttttcatatccagtttgaggactaaaggaagtcatttgttcagggttctttctccctggaaaggcccacttaggagacccgattaagtggctttaaaagttgcttggagaacacagaagtagatctaaaaaaaaggagttctttatttttatggaatatttgtaccaaatgttgatactttttttaaaactaccatgtattacttcttctatactaggtgcactcttatttagtcatcgccaaagtgtcttgagatacattatagtgttctgtcttagagaagtaacttgcctgaggtcatacacccattaaggagacgtctgcaactgagcaggatccctccacagactcatgcctaagtactgctttcagtgaagtgatgtcagctgtcagagccagggcaccctcttccctggttgtgacaaacggataaatttcactttctatctgtgcctagccccttttcatctgtcaccctaaaaatattgtctccagccaatggaattcattggtgacttatccaggggaccacccgccctgcttaaatggccattgatgggaaagagccagcctgttctttggtaatgagcatgtccagtctgacactctgctttccctctggggcagcctgttccaaggatgctgttggaaagtacctgccagcaccatgaagatggctaccaaggcatccaccctgagccagtggaacccagggctgcgacaactcactctggagcccaggaggatggcgcttgtcagtatcagaacgatatccaggacctcgcccccgatggacagccacaaaacacctgccaaagaacgggatgttggaaacgctggacacttctaattcagaaatactaaaatgttcaatcctttgatttagttcacttctaaacaaaacatgaaaaacagacacgctggagtgaaaatcacagatgcctctgctgaatcttagctggcaatggaaaggcactcctcagggctgaaagagacggttgtagggattgcccgtagctgaacgggcggtggggtgggggcggggaaactaagcaaaaccctgctgtgaggatatgagtggtgctgggggtctccatgccctagctcaaaaactaccattgtgtctggagttggttcctgccggtgggttcatggtctggctgacttcaagaacgaagccacagaccttcgcagtgagtgttacagctcttaaaggtggcacagacccaaagagtgagcggtagcaaggtttattgtgaagagtgaaaggacgaacactccaaaccatagaagggtacctgagagggtggctgtggcgggctggggtggccagcttttatccccttattggcccctcccatgttctgtttctgtcctatcagagtgccctttttccagtcctccccgctattggctacttttagaattctgctgattggtgcattttacagagtgctgattggtgcgttttacagagcgctgattggtgcgctttacagagtgctgattggtatgttttacaaacctctttaagacagaaaagttcctgattggtgcgttttacaaacctcttgtaagacagaaaagttccccaactccccacttgacccaggaagtctggctagcctcacctctcaccatgatgttttgattttaccagaagatatcatctttgccttttgcaagaaaaagttacacaaacatgggggtggagggtctgtgagttggagagtcctgtctgcaggtaccaaaacctcatttgtttctgtggaagccacttgtttacttcctggagaggatcccacctgtggcttcaaggaactctgttgccagtggagagcaatggagaaaagggacagaaaaggaaattcatctttgcgaaaggactcctctaaggcaagttaggtaacggagacacagcaatgaatagacgtgatccatgccttcacaaaacctctactccagctgggagaacagacactaagaaagtaattacaaagatactgagtgttagggagctttagagagaagaaaaaactgctctaggcagtggtgtgctgaagcttatctcagagctctgtgttcatcttgcaactgagagctgcattcatcttgcaattgaaattggctatggtgggaatatttacaccatggaacacggccagtgctgccaatcagggcttcccatccaccctacaaagttggctgttaaacatttgccagcacaccactggctatagggcacaggaagagagcctgtggttctagcttttgggctggacttcatggaaaaatcatcaatgactccctcatcatttcccctattcccaataaaactataaaaatagtccaagctatgaggagtgctagtgggcagagtgtgagtaaggtatttaccttgttcttcagctggcactacactccggaaactcctacacttttcatctgaaagataaagagaatgcatccagaagtgggttacacttcacaaccagggggcaaatggtgaatttctagccccttaactggatgaggaatggggagtgtgcagactgctttactgctcagggacatgagctgctcctctgtgtgggagcctgatataatccaccctattggactctggcttggccacgtaacactctttgaccaatgaactgggagcaaaaatgaggtggatctgagcagctttaagagccagtgtcttttcccttggttcctgttcccttgctctgtaatcccagaggcccatatcaagaggaagtctccatcagcctgggtccctgaatagctacaatgaggacagaccccttgccaacctgaaaagtctatacagaatgagctaaaaataaatgtgttggtttaaagcactggaatttggggggttgtttgttattgcagcctaacctatcctatctggactaatactgcaagtcttagaccagggattctcagctttggaaatagcattcattatggtatgaatctaaaataattggcttcttgttgaagggaaatgatcaaagttcgcaatttatttttaaatgagtgagagcagattcagagccatgtctgttactaagactcagcaggtgagtcacgcattcgcttgcattccatcatgatttcttgactatgaaaggaaggaatcgttgtgtgtgtaccaggtattgggcagaagccgccaccagactcatttatgtgctccagggggatagatactctttgtatgtgagtgtcatctgtcaggttgcacacatcaggtgaaaaatcttgagccacagccttacatatgcagttccctttaaaattctaagtccatggatatccacttggtgtgaagatgtaaccaaattctggtttagggggtgacagatggaggattgagaccatggcaagtcactctctggggtcctgtcccagctgagtgtcctgcactctctctactaacacgtcagcccaaaatagaatcatagactgtcgagtgggaggagcctgggaaatcatctggttcatccccacgcagtttacaggagtgcgttcaagggcctctgagggaaagtgacttgctcaagacagcgtaggtagaggcagtttccgtgttagagctcagggctgcagagcccgggcccagcgctgtcccgctacatcactgacttaatgcaatcaaggaaaggtgccgggggtgcaaagatgcctgagacaagggagccgcccccagtctgatcctggtgggagctgaagcagagcatgtttttttcccattgactcttcaaaggaatggcattcttatcaccaaccaatagtcacttatcacttatcacttatcacttatccaatagtccccaccttagccttgctttgaagattacatgaaacaatacttacgaaacttctatcacagttcatacgcatttaaatcttattagactataatgagttctattagagcatttttgcagtggttagcatgaactattatttatttccagactctaagcaaccccaagggcaaggttcatgccagctaccattgctggaagattccaggaacagagggagtttagggagcatctgtagacttcaagaatttttttttcttttataggagagaaaaccccaagtaatttaattttcctattcaagaactctctatggctccctatttcccctagcatcaagtctaaattcctcctgttagcttttatgtcctctctccatcaccctgacttcccaacacacagcccatctttttgcctccccagcaccacccagcattcaccttccacctccccagggtcccatactatcttagtcctgtaacaaattaccatagatggggtggtttatcaacaacaggaacagcttttcagatctggagactggaagtctgagatgcctgcatggtggggttctggtgagggccctcttccaggtgcagagagcttctttcattttttttattttttgagacagggtcttgctctgtcacccaggctggagtgcagtggatcatggctcactgcagccaaaatctcctgggctcaagtgatcctcccatctcaacttcccaagtagctgggactagaggcgcacgccaccacacctggctaacttttttattttttggtggaggtggagtctcactataactcctgggctcaagcaatctgcccacctcagcctcccaaagtgttaggataacaggcatgggccaccatacctggccagcagacagctttttgtagtaacctcgcacggcagaaagagatctggcttgctctctagcctcttcttataaaggcactaattccatacgtgagggctccaccctcatgacctaatcaccacgcaaaggcccccacctcctaataccattacattggggttagggtttcagcatatgaacctggggaggggacacaaatatccagtcacagcacatgggaaggatgatatgtgtgcaagcatacgcttctggcagtgcatgtctaatccttataaaccttaagatttgccatgcccatgctcgtgaatttccaagtgcccgtaggcctcattccttcacacttctgcatcacccctctgctgagctatagggagaagagaaactcaggttggggtgatgatgtaaccatttcctggagcttctccactgggatgttttctgactcgaatgcgcagccagggattcgtgcgtcacatgactgtccatctcagagggcccgaaggagaatatttacacagcctggggctgagggcaacaggatcagggacctgtcagtccatgggcagccacagcggcctctgcagcatttcaattaagtcactttggattaatgtgattggacacttctcctgatgtcagcagcagtatcacggtcacagaggaaacaattcatctgagcctcgccggttctcccaaggatgtccccaaagcactggaaacacctcagtcctcacaccctgctctctctcggagaactcgggggctgatgcagagccttctctcacgtcgcctcatccgatcccaaccataccctggcgagtcaggccagcatgttggcagcagatggataccatgggcaatgtgtggcatttacatccacaacgcctggcatctctgcctgtttctgccacggtcagtcaccatcgcaagtttcctggcctctctgagcctcactttcctcatctgcaaaatgggtctaatgaaaggtctccagtgagaaagttgtgaaagtattttgtgaactgcattccacagttttttctgttttttttgacggaggctcgctctgtcgccagggctggtgtgcaatggcatgatcttggctcactgcaacctctgcctcccgggttcaagcgattctcctgcctcagcctcccaagtagctgggattacaggcacccgccactatgcccagctaattttttgtatttttagtagagacagggtttcaccatgttggccaggctgatctcaaactcctgacctcgtgatccgtccgcctcggcctcccgaagtgctgggattacaagcgtgagacaccgcgcctggcctttccactgttttgagtgttgagttattaataaagacaagtacaatgatctcaattttatggacctggaggagaccaggctcatatgaattggtagagtcaagaattaaaaaccagagtttctcacctaagactcagaggccttttctgaatcgcttcttgtctttctacctaatgcacggagaagtgaaggtctaacttgtcttctaaagagaactgcctttcccaccaggaatagagacgaggccagcacagagccagggctgggcaaagagaaggtggaggccagccaaggagattaagagaattcagaatagcttagacgggtgagttcagcttgggcccagagtcagagcctagtgacccctttgatgaatatgaatccttagaaatggtgttcgttttgaataaagccagaaggattaaaagaaaaaatctttataaatcccatgaagccagggaggcgggtgttacatagcgtgtgtgcttcagcagccaagcaggacagcaagccagcccgaggaagtggcgtccgatccctccgtacctgactctgacatcctctgtcattttgttctccgccggcccccactccgcccctatcctttatggggtgcctgtgtccctctgtcctgaactttttgagtttagcagaacagcatagaatctaaaatccacacattttgtggattcacaaactcacctaaggaaaagaacatttcgcgtaagtgctgcctgggccaggaactgtcatttcagattgtgggatcaaagatgtgggttccctttaaagacatcctaggcactggggagaaagggtagagttct[131 bp omitted]acttggccaacatggtgagaccctgtctctactaaaaatacagaaaaaaatagctgggtgtggtggcatgcgcctgtaatcccaactactcaggaggctgaggcaggagaatcgcttgaaccccggaggcaggggttgcagtgaggcaagattccatgggtatgggtcacttacatctctggaactcagtcttctcgtctgtaaaatgtctctattgttctaggtcagcctttcccaaagcacgttccaccaaacaatagtcttatagaatattaatccttattaaaaaaatctcttctatgctccataaatttgggggaaacactggaatatgtaatgttaaacaaattcctgtatcgggggacttctcagagattttgatgtgctaatgtgcgttgtgaatttttaagaagaaaatgtaacatattacggaatcttttccagtttgttggacttcaagatactttttctttacttttacaaagagcatctcaaaaggcatctctgaggagtaatatttgaggacatccagtgaggtacttattaagagctctttctgtcctgatacaagaatatagttgcatagaagtcagacagaggttgctatggtttgaatgtcccctcccaaactcatgttgaaatttaatccctagtgaggcagaattgagaggtgggagctttaagagatgctcgagtcatgaaggctgtgctctcgtgaatggattaatccattcatgaattaatgggttctcgtggggagttggactagtggttttgtaggaagaggaggacagggccgagctagaatgttagcacgctcagcaccctcagccatgggctgccctgcacctccctggggctctgtgaagagtcctccccagcaagaagcctctcaccagatgtgctccctcgaccgtggatttcccagcctccgtaatggtaagtaatacggttcttttctttataaattacctagtttctggtattctgttttaagcaacagagaatggacaacgacagaagtcaagaaatacatcctttatttctccttgctgttgtccatgaatcatggagaacactaactctctttatattcagtgtgtgctcctgacagtatgggaaaaacccttccgtggtgtgatccagaaaaatgtgcacgtgcacgcgtatgcgtgtgtctgtgtgtgtgcgtgtgtgtctgtgtctgtgtgtgtgtgtgtgtgtctgtgtgtgtgcgtgtgtctctctgtgtgcgtgtgtctgtgtgtgcgtccgtgtgcgtgtctgtgtgtgtgcatgtgtctgtgtgtgcctgtctgtgtgtgcgtgtctgtgtctctgtgtgcacgtgcgtgtgtctgtgtgtgcatgcatatctgtgtctgtgtgtgcacgtgcgtgtctgtgtgtctgtgtgtgtctgtgtgtctgttttgcatgtctgtgtgcgtgtctgtgtgtgtctgtgtgtgcgtgtgtgtctgtgtgtgtgtgtctgtgtatgtgtgcatgcgtgtctgtgtgtatctgtgtctgtgtgtgcatgtgtgtatctgtgtgtgtatctgtgtctgtgtgtgcgtgtgtgtctgtgtgtgcgtatctgtgtatgtgtgtctgttgtatctgtgtgtgtctgtgtatctgtgtgtgtttctgtgtatctgtatgtgtgtgtctgtgtgtgtatctgtgtgtgtgtatctgtgtgtgtgtatctgtgtgtgtgtgtgtgtgtgtgtgtgtgtgtagtaaacactctgtgggtttgcagaagtgccaaggggacttcctctagaggaaggaacctgaaagagcctcacacatctctcactcccgctttcagctcgttttaggctgagaagatgccaccaccaccaccacacacacgctgagttacacacacacatacacacgcgaactgagtgacaattttttatcagaaatcttggggacatttttaccatctacctgtgtagtgtttgtgtgactacggctcatgccatatgcaggtagccaggttgcagctgctcccacccctgccggaatatccagttccacactttcctcaagcccagcccatgcggatttttcctgccagctgcctggttactgatgaagcagctccctcccattggtctaattttccaactctgtcttcaagttcaggttctactctggccctagctcctcctgacatcatgactagcaagcttccagttctctccaacgaggcttttttttttttttttcctcgaagtctcactctgtcgcccaggctggagtacagtggtgcgatcttggatcactgcaacccccgcctcccaggttcaagcgattctgctgcctcagcctcctgagtagctggaattacaggcacccaccaccacacccggctaatttttgtatttttagtagacatggggtttcaccatgttggccaggccggtcttgaactcccgacctcaagtgatctgccctccttagcctcacaaagtgctgagattacagatgtgagccaccatacctggcccaatgaggccttttctgtttaggaaatgtctgctcagttcctcctgcttgggtgacagagaccttatgttgcagggaaggagaagctgtctcaggtgacatggaaaagccatgtgagccaagttcttctgtaagaacttaaggattccttctctcccctgccttgcattctgatgcaaatacctgggttatgctgcctcagacattggctcactcagttctgcctgcctggaacgttctcatccccaatctccatctattaaaatcatagccttatgggcctggcacagtggccacctcctttatgaggtcctccctatgcctagagctataaataacctctccttctgtgtaactcagttcttgcattgctataaaggaatacctgaggctgggtagtttataaagaaaaaacttttaattggctcacggttctgctggctgttcgggaagcatagcactggcatctgctcagcttctggtgaggcctggggaaacttccaatcatagcagagggcagagggggaatctgccaatcacacagtgggagtgggagcaagagagagaagggggaaggtggcacacacttttcttgttttagttttagttttgttttgttttgtttttgagatggagtttcgctcttgttgcccaagctggagtgtaatggtgcgatctcggctcactgcaacctccgcctcctgggttctagcgattctcctgcctcagccttccaagtagctgggattacaggtgcacaccaccacacacagctaaatttttttttttttttttttttttttttgtattttagtagagacagggtttcactgggttggccaggctggtctcgaactcctgacctcaggcaatccacccaccttggcctcccaaagtgctgggattacaggtgtgagccaccacgccctttccaacgaccagatcccgtgagaaatcattcactattgcaaggacagcaccaaaagaacagggctaaactattcgtggtaaatccacctccacaatccaatcacctcccaccagcctccacctctaacaaaggcggatgactttttatccaaactctatcacccccgtttccatttccacatcataggtgcatccttgttataaccattatcatatttgtccttgttcgtttgtaccttaggtgggtctcttccactggatccttgctctcagcactggggcttactcacctttctctcctcccatcctcctggccctgtgcctgacaaggaaatgactgtcagtgaattcactctgcactgtgctgactcccttctttccagaggtctttgatgtacactgaggtgggctcctcagactctagcgtctgtcataatcaccaggggggcttattagaaacatgagtaacaccagataaaataggattgagtggaataaaacaccagtgccataaggatcagaaacgaagaggcaatgggcaactccagaaaaagcaaaaagctgaacacagcaataaacatcaccacagcacctactttgatgctataatgaacaatattgatagagtcaaaatatattattggcttactgatttcaacaaagcagcgatataactttattaggaagatgacagagggtatgtgggatgttgtggtatgagagagttaaatcctatttattataacaggaagttaataggtaatgtctaagatgaagccatggctatgtaaccatagtttttgaaaacacggaagaaaatactagaagaaacacttaagttaactgtggtttctcctgaagtgtgggactaagttatggagaagaaaggggcaagggagtgttgatttttcatagtagcttttcaaaatgagttcatctcttgtctatgagtaaatatcaccttggttaaaacttttttttgtttgcttgttttttgagacagagttttgctcttgttgcccaggctggagtgcaatggtaccatctcggctcactgcaacctctgcctcctgggatcaggcgattctcctgcctcagcctccctagtagctgggattacaggcacacatcaccacgcccagctatttttttgtatttttagtagagatggtatttcaccaactcctgacctcaggtgatctgcccgcctcagccttccaaaatgctgggattacaggtgtgagccaccacgcctggcctgtattctttttctttaaaaaaaaattttggccaggcacagtggctcatgcctgtaatcccagcttctggggaagctgaggcaggataatcacttaaaacccaggaggtggaagttgcagtgagctgagattgcgccgttgcaatccagcctgggcaacgagagggaaattccatctcaaaataaaaaataaaataaaataaaataaaataagaatacagacctctagactccaccccggctctcttaaattagaacctccaggactgggcacctggatatttcttttacaagttccttgggtgatacatttgataactggtgtgacgcctatatagagctgtggaaacagaagtactataggcagtcctcatatgagaacttggaaaggagatggaatttcccaagtgatttgcctataagtatggtgaatacagtttccaaaccaaaattctggaagtgttttggaaatcctccaggatgcagggtcctgagacttttgcctctgtccatgaaggtggggaagagactcataggaagatagcactccctgagaagcgaggaactgtggaggtcctaaatagccttagctccaggcactattgcagtgtctgtaccacacttaaagcacaagacacaggcactggcctggatacatgggaggttcagtcaggctgggtactgccccacattggccaccactgggagagagggtggaagggagggacatacagcacctctgagtgttcctttttttttttttttaatttgagacaggtctcgctctatcattcaggctggagggcagtcacacgatgatgactcactgcagcctcaacctcccaggctcaagtgatcctcccagagtagctgggaccacaggcacaccccaccatgtccagctaattttttaaaaaaaccttttgtaaagagaggtctcactatgttgcctatgttgccaggctggtctgtaactcctggtctcaagtgattctcctgtctcagcttcccaaagtgctaggattataggaatgagccaccaggctgggcctcaggggcttcattcttgttgccttttacttaggcctcaggaacaaaaatcaaatgctatgagaatggaaaaagaaaaggcaattagaaactccagaaaaagttaaaaaactgtgcaagaaattgactgtaataagctgaggtcaggaaagaaatggggatgggaggattcctcctttttctgccttggaggttttgcgtcccaagcagaaagggaagagtactctgtccctgaacgcgggcttacagccaggctgccaaatatggaagagtcaaattcctccctcctcaattctttgagaggtaaaaacacttctgtttttaaagattcactccaagatcattccaagtgcaggataaataacagggatgcaccttcgagttgggtcgggaccacctttcattcccaaaggattttaaataccagggattcagtgacaagaacaaacgagaaactaattttaataaacacttgcaatgtgtcaggccctgttgcaagctctgtatgtgaatctggtcatttcatctttacaatcactcttggaggtaagtactgctatcattcccattttacagatgagaaaactgaggctcagagaggtgaagggacttattcaaggatacctagacaatcagtggagatgaaggattcaaacccagacagcctggctccagagcccctgcatcatcccgcacctgttacccccagaatctgcaggattcaaacccagacagcctggctccagagcccctgccccatcccgcacctgtcttccccagaatctacaggctttgctcaccttcaccgttgaggctctcctcgcaggactgccagagccccacatggaacccccgctgaatgaacttgtcatcacccagctcccaaatgtacaggacagcctggctattgttgtccatcctgccattgctgctgttgtcccgtttgaagtgaatgcagtgctgccctcccggctggtcctggcacagtggcttcaccacccgtcgggtcccctcacaccagtggctgctgaccacggcggtgagggagaaggtgagggcgaggcagacagggaggaggagcagcgcctgctgctgcttggccctgtccatggctgagtgaggtgcgtggggcaggatgagctgtggggccccctcctcctgcctcgtcacggtacctgcccctcagctctgccatctggcatcctcacacagcctcctctcacgtccccctggagaattgcacgtgctgccacaccagatccagaggcacagagccggggcacgttcctgtcaagggtgctggccctgccattctccccaggaggtaggtgtgcgggagggcattgtttttttttgtttgtttgtttgtttgtttttttgagatggagtttctctcttgttgcccaagctggagtgcagtggcatgatcttggctcacctcaacctctgcctcccgggttcaagtgattccactgcctcagcctcctaagtagctgggaccacaggtgcatgccaccat[182 bp omitted]tgaaattaaccatctcaaccttttttttttctttttttgagacagagtttcactctgtcacccaggctggagtgcagtggcaccgtcttggctcactgcaacctccacttcctgggttcaagtgattctcctacctca[133 bp omitted]cggcctcccagagtgtgggattaccggcatgagccaccacacttggccatctcaatcttttttttttttttttttttttttgatatggagtctcactctgtcgcccaggctggggtgcagtggcataatcttggctcactgcaacctccgcctcccgggttcaagtgattctcctgcctcaccctctagagtagctgggattacaagcgcacgtcaccacacccggctaatttttgtatttttagtagaggcggggtttcaccatgttggtcaggctggcatctcaaccatttttaagtgcaaagtttagtggcattaactacgctcacagtgttgtgcaaccatcaccaccatccacctccagaactcttttcatctttcatcatctgtacccatcacacaactcccattgcccttcctcctctgcttggcagccaccattcttctctctgtttctatgaatttgactactctaggtgcctcctgtaagtgcactcatacagtatccgtccctttgtgacttgcttacttcgcttagcataatgtcctcaagcttcatgcatgttgtagcatgtgtcagaatgtccttcctttttcaaggcagaataatattccctgtgtttgttggatagcattttgttcatctattcagacacctgggttttttccaccttttggctgttgtggagggtgctggttttgatggaagaccaggggctgtttgggtggctgtcttggtgagacagcctcaccattgccttttgcatggagcaggtccttagtgttggattccggaatcagggaatcccaaggacttcataggcctgtttcttgtccagctctatgtagagaaggactacggaaaacagatgcttgttccagggatgctgggtgatgcgaggtacaggcaggctacctcagggccaaggtgctgtgcagaatggggagggcagcatgtatcccacttggctgcagggttctgaggccaggggcccgcagatgctagaagacagaaccctgggcaccatcgctcaggccctcactgaacggggcactggcaggagcagtgatgctgaagatttttaaggaactcctcgggcagaggacactgatgaaggtgtgagggcagaagattctgcagagcatcctgaaaacacacaggctcttgatgatgtgttagacacctcctgaataccccccagacagaatctggaatctatgtgcctgggctagacagtgatactgggttaatatcactccatctatactttgccgctggccgagtctgggcacctgtgtcctgtgctctcactggcctggtggggtgtccagtctcaagggaagaggccttactaagttccatcgctagagggcaaccagccaatgggtggggaagtcgtgtgtggcccccaactttcatcccttcagaaataaaggatgtttttgagaaaaagttgcaagagatgagatggaatattcttgcaaagcaggtattttctttaaagacagaccattttccagcatgcaacttggaagatgatctttaatgagcactcacagaacggagttgcagccacattcaatgaccaaagtccatcccttgggtactttctccctctgggtcactccatcctgctctctgccatcccagagagatgaccacgtcaattccagaggtgacaccactctgagtccatttctagggtctttgttctagttgagcttttcattgttaaggtctaaaatcttgtcacatggagtttttaagatttttagggatgtctattaagaaaagcatggctgcttttcccaactgttcagaattcattcagttgaaaagttacccaggatgagttcctatgtttgacttgaagagggaaggaaaaaataacacaaaaacaaaaccaaaaacgaagtgaaaacatgttcttcttgcctcttgctgactcactgttccaaccaatcaagacatcttccacctgggcctccaatttgggaggctgggagacattgcagggacgctgggagctggcctgggagaggtggagtaagaagttccaagcagagcctttgggaggcatggcgatgagcctgctaagaactcaccggagagggcaggggcaggacagggcaccctcccaagtacctgtgctcaagcaactctggtcagaagacctgcctatccggttctgctgtttacttgctgtgtggctttgggcaagccatccaacctctctgagcctcaatgtttctcagctgtcaaatggagaattcatcgtatcctcatggggttattgtcaggatgtgcgaaataggatggtgggttaaaagacgttgtcaatgtgagttgtggggacagcctactcctgtgctggttagtaagtgatgtatcatcaattccataaaagggtctgtcaggtgggctgagccacatgtgcttagaacaagtgggcattcaagatgagtgaatgttgcacttttcaacacactgttttgctattgtgtaggcataacctacgccgctgattgggtttttgcttcatggcctgggctgggagctgttctctcctgagctgagcaaccacctctcctgcagtctctgcataaacaggacccagaggagattttgcctttgtggttagcctcagcccagcctggacaagcttaatgccttagaaagaaataccctgcctcaaaaagacacctgcctctaaactggctcgagccccatcgccttctgccagccattcctctgtagctcgaaccccagcctgtctcagccagcttcgtgcattgagcagaaccttcagggtggagcccgctgaccgccttgttctttctcctcagcctgtcaaggaagtcccagaaagcacagctgacttagggaaggtctgggaaaaatctccctgcttttgggggggcaggggcgggggatgagccagggccgagaaggaactctgaagactccgtagattgctctagaccgcctcagacactctcggcgcagcgtggagaggatttgtgcaaacatttcctctgtggaccaagaggaatgcaagaggaggctgcctgcggtgcatcttggacggctagagagatgtacccctacttgtgaaggtgcacgaggaagatgaagctgggatcgagcagggcagggcctgggagaggaagcgcgggactcctgcctggcgtccacgagctgcccatgggcatccctgccccctgggggaccagtcctctctccttccacaggaagtgctctctctgggcccctgggaggcccttcctcactctggtcctgctggtttccatcaagcaagtaagagcagttcattattattattattatcagttgtatttcctgatttttttttaaagaagcaatttaggcctcatgtaagcaatttggaaaagagaaaacagtattaagaaaataatgagccgccataatcctagcattcaaaggtaatcactgttcatattttggcatattgtcctcaaaccttttctctatgcatttgtttttttttacaacagctgatattaggaagcataaaacatgttgtgtcctggtccccccaaccagccccgcatcatattataagcatttccccacgtcaatgtgagttctgcaaatagcatttacaattgctgcacatatccttctgtttgtcttcagtattctcccagctttgagtatttaggttgagcaaatccatttttctttttcctttcctttcctttcccttctgtttcctttttcctttcattacaaaaatgttgaacgctaattgtttttttaaaatacaattcaaagaagtgaaatgcaaactacaaatcactctacttccaacagctgcagatcatcctcattcacatttgggggcttatacttccagacatttttctaccattgtttgcatacagttttttgtttgtttgtttgtttgttttttgagatggggtctcgctctgtcgcccaggctgaagtgcagtggtgagatcttggctcactgcaacctctgcctcccgggttcaagtgattttcctgcctcagcctcctgagtagctgggattacaggtacgtgccaccacccggctaatttttgtattttagtagagatggggtttcaccatgttggccaggctggtcttgaactcctgacctcaagtgatctacccgcctcggcctcccaaagtgctgagattataggcatgagccactgtaccaggcctacatacagtttttttttttaaacaaacacaggcacatactataaatattattttgtaatctgctttcttcataacaaaatacactaataacacagctgacatcactatggagcacttgctctgcactgggttgagtgccaggtgcccccgttcctcatattttctccttctgtgttctcagcaaccctatagactgaggttctcttgttaatccccttttacagatgagtaaactgagtctcggagaagttgagcaacattcgtccatgttagtaaatgtagatccatggtataatatttaagggctttaagggtttattgtaatgtctttaactatcctctatcgttgggcatgctggtagcttgctttattctatccaagaagattagaccttcgtcctctttccaagtttccatttggatactgggctatgggcagtataaaaggatgatgggaaggaaccccagttccacttgtctgaataacgaaagtagcttaaggaatggctcagactgggcacggtagctcacgcctgtaaccccaacactttgggaggctgaggtgggcagatcacaaggtcaggagttcaagtccggcctggccaacgtggtgaaaccccgtctgtactaaaaaatacaaaaattatctgggcatggtggtgtgtgcctgtaatgccagttgctcaggaggctgaggcaggagaattgcttgaacctggaggtggaggttgcagtgagccaagatcacgccattgcactccagtctgggcagtagagtgaggatctgtctcaaaaaaaaaaaaaaaaaaaaggaatggctgtcttcctccttcgttccatgggcagggtgagtccctgttcatggtcttggaattctaaacccctccaatccccatgtagggcaggctgtggtaccaggtctcatgagggttcacctcaggctttctttgttgcaagcctggggctagacaggcagataacccctgccagatttcctacatccaggttcccctagaggctgccttcaggccctcatggattgtaaatgtgagcccaatcaatggtttcatggaattcttgccatcttggcagcctctcccccagtgaccagaacatccttcaggaaggtggccctggcctgcctctggtcccaggacttcaatgtgttagtggtgggaccatttggtgggagggttggttcagaacattcatccttgcttccattctctggatatctcatatcaacactgagtgagtgtatccagcttatcatgtagttttgttcacaaatgtggattgctgaccacatgccaagccctgagacagcgctcaggatattatcataaaatgcttcctcacacatcatcttacttaatcctcaacacaagcctctgagaagagtgttattactgagccccttttacagatgggcaaattaagcttcagaggagttaaatggttgcgttcgatgctgtagctcctgagcactgtagccgttgtgcctacccggggtgtttgaagccctgtgttttttcttccggagtgctcttgggagttgctgatgtatgaatatttatgttacaacagcggaatctgcagagcctcgggccggcttaccaggctgagaaagccacaccttgaccctttcagtctggtatttttataatcaataacatgtctgctggcagtgtctgcttccactctctgccacccagtctgcgttttcagagcatttctggctgtctgtcctccgggtgtgtctgtaattctgatggccttactcttggttctccatcttaaccccatattccttttctagatgtttatattacaaggctttgtgaagactttcatgataaattctgctcatagcctctttccctgcatggaatataaatgactgtggtgtgtgttctggcaggaagtcttcaaaaatttcacttaatgagaaattctcagggatagtttagtttctaaattcaagcagggaggtagtgttatccccacaccactctctcccacactcgtttaagttatttagcagttgctttggcatcaaaaacataaactatctaaggatttttgagaagtacattgcggcccttttatacatggatggcaggagggtaaaatggtgcatatttaaaatttttaatttttttttttttttggtgagggtagacagtttggcagtcaaaaacctttaaaactatgtgcattctgtgacccagaaattcaaattcaaagaatttctaagaaataaagatgtgctctcaaatgttcaactatgaggattttaatcacagcatcatttacgtcagcaaacatcttaaaacaacataggcattcaacgctagaggatttaaaaactaaattatatcactttttttcatagaatgttatgtagctgttaaaaggatgctttacttcatttattatttatttcttgaaatggaaatatattcacaatattggtcttctaatgaaacataaaaggctttgaaacaagattattccctttgaagtcacaataaaaaagaaaagaaagacaatgaatgtgtctttcattcacagagagaagaatctggaagtagatggtaatttctgagtaatgagatgataatttcaccttctcccctttttgcatagctgtgatttctatttcatctacagtgaagtgtattccttctctaacaaagaaaaacagatttatttaaagagagtcagtataaggatttttctttccttttccttaatcccttctcggccaagttcgttgctgatgctggttgcctatgcaagggaaaaggaatcaaggtcaagctggacttttccagttggaaaaaaattcacccgtatatcttctttcctcatgactttgggaatctggctgtgattgaacttggatgtaccccttgtgttttttatgtctttagggcaagggaagacagtctgagtttgtccagctctcctagactgacaaaattcagtactttttagttttagtttgtttttctgcttttgactatggccattggccatggcaaagaatggaggataggggaacattactccagaggctgattttattgtctcttccttaatcaggtcccggagaggtccctggggtcataaatagtactttgtccaccaatggatcttacactgatgacttggaggattctagaagcttattatttggttagcaactcatctgctgaatttgtaaaaatgatttagagtcagttatggtgccattaaagatgtttacttctttaaacaatatgttaataacttacatgcttcctcttgggccgtaactcagagagagatattaatagagattccaaactcataggaaactgaaatcaagggataaatgccaattattgtatcattattattacttattggataattgcatgattctcaaactgtgtgcttgtataccccagggcaccactgtgaactcacaggggtgctatgagatattttaatttttcaagggaagtacagtgatatgtagcattttccagacaccatgcaaactactagcttaaggtattcatggtgttaacattagatctcaccccctcccttttgatgatgttgtctctttgcaaagctgggttttccacaggtcctgtgattacaaagcaagtatagcacaaaaatcagtgtggaacaggaaataaaggtggtggcatccgatctgatcctaaagcttgagaagttgtgcaatggacagcaggcactaagctgttaaggcataaatatttattaagttgtttggacttacttacttaataagtggggctttagatatatcttttggcctagaagtgctgtggaaaaattactgagtcaataagtttgggaactgctggtctagtgatgaccacactagctcttcttcaaaaagtcggctgtgtgattgttgctgcactccctactggtataccagtcctacctcattcttttgggataaccttaaatctacctggccctagaaaacatttgagcttgttgccccttgtgagaagagagaaaaccttaaagccaaatgattaactgggtgatattagcccagatcatttactgaacccttcctcatcctccgtctcacaagtgagcctctggaaatgaaggacagcaagagcattaactccagccctgtgctgggggcttgtattcagagatgaaagacacctctcagtcctcaaggagcttatgggatagggaggaagatggataagtggcccaccaatgacattgcagtgtgatgggccatagggatcggtcatgcaggggaagggtgacaagctcaagactcagggagatgagtggttaagtgtggccaagggtctctaggcttgagttgggccttgaaggatgactaggagttcaccaggtgaaaatgagggcagaagcgagtgccaatgggaagtgcaaggatgagaagtcatgaaggagcacgacttgggacaaggatggctgagatgctaaatcctgagaccacaggccttaagtggaagactgtaggcaggagagccctgtgctcagctctggcctgttctcctgtcactgtggagcagtgtggagggtggatggtggcaccaggccagaggaggaaaggaagacagggttggacaggagagacgttaaggaggtggggtcgatggaacctggacaaggggaagggagctgctgtggacgactcctggtttcaggtttctaatggagagaactgagccacacttggcatcgtagggatgccaaagacgacagaccagaatgcccttggccttgcatgccagccagttatatagctgccgtctctagaacagattctaagtcctttttagggtaggggctgtgtctcgctcatctctgtatcctctttaattcctccttaacacaaggcctggcccacaataggtgcctgatgaacaatagaagagaaagccctttttaaaatcaaaagaagcccaggtatagtggctcatgcctgtaatcctagcactttgagaggccaaggcaggaggatcatttgagcccaggaatttgagaccagcctgggaaatgtagcgaaatcctgtctctacaaaaaatacaaaaatgagggcccagtgcagtggttcatgcctgtaatcctagcactttgggaggctgaggagggcggatcacaaggtcaggagttcgagaccaagctgatcaacgtggtgaaaccctgtctctactaaaaatacaaaaattagccagccacgcctgtaatttcacctactcaggaggtgaggcaggagaatcgcttgaacccaggaggcggaggttgcagtgagctgagataacgccactgcactccagcctgggtgacagagggagactccatctaaacaacaacaacaaaaaaacttagccgagcatgggggcatgtgcctgtagtcccagctactcaggatgctgaggtgcgaggatcacttgagcctaggaggcaggggttgcagtgagcggagattgtcccatcacactctagcctgggcaacagagtgaggagaacttgtctcaaaaaagtaaataaataaaataaaaataaaatcaaaagaagtggtacaggtacacaactagaagctgttacacagcccagttatctggaaagcccaaaacgtgctatatttccaaggttcagtggcatgaaatagtcaacgttagaaaggaaaaaactcccaactcctcagtagcttgatgaagtctctcagacacttctctttgtactgaacccacttccgaattgacttctcaagaatagatccgggccaggcgcggtggctcacacctgtaatcccagcactttgggaagctgaggtgggcagatcacgaggtcaggagatcaagaccatcctgcccaacatggtgaaaacccatcgctactaaaaatacaaaaaaattagctgagcacggtggtgcgcacctgtagtcccagctactcggggaggctgaggcaggagaatcgcttgaacccaggaggcagaggttgcagtgagttgagatcgcaccattgcactccagcctggtaacagattaagactctgtcttaaaaaaaaaaaagaaagaaagaaagaaagaaaagatcctataacctgagcagaaaaaatcatggtcacctccagagcagagaatctgtctactcagagcctttgagcctttgactttggacctgcagatacctgggcaatgcaggcttctgcaatcctctggtccttctgtcacattgttgcgtcttagtgtgatgcgtctctctttgggatctacgtagtcttagaagcatgcaactattcatgtgggaggatgcaaaagtttaggataagaattttgcgtactcttgaaatgtcaacttcacttaaaggtttttaattttttttcatatttgtattaaagccaatatgattaggttatggagtgaatgtaaaatttgtatgtactcttaagatagaacataagatgctgaagaaatgccatttctttgctgtgggccattgtgggcacttcagtgggaaggttggagaatcatggtgtgaagtgacaacaaggccacatctgtgcttggtcactgggggtgaccatgtttttgtttgctcaggttacaggatccctccttgaggaaacgactcggaagtgggctcagtacaaacaggcatgtctgagagacttactcaaggaaccttctggtaagcatgtgtattagttatccgtggctgtgtaacaaattgccccaaagcttagcggctcaaaacaataactagtcacttattacttctcatagtttctgtgggtgaggaattcagacagggcacactggggatggcttgtttccgctctgtaatgtctagagtttagctggaagactcccatggcctctacacttggccggggcttccatacagcatgatggtggggtctctaagggcctgcctgaccagaggccagactgccttttatgacttggccttggaagtcatacaagatcactttggccatgttcaactggtcagacagctacaaagctctactcaggctaacagtacagaaacacagaccccatgccccactgtaaggaaacatatgaaaccacatgtatgtggatgtggccgtctttgataaaagccatctgccatggcacactcatcacctgatcatatgacatgattatctgctgtagattagcctgggaatctgttaaaggaatgggggtggggggcgcgggtctcccatctcccagggcattaactaaatctgaatagtaacatttctcttatccaagcatacactaagttcagaacattctagcgaatatgtaattgttgtctgcaggctgactcttcgggtgcagccacgtgcaccatgcccacctccaaaagaaaaaaagaagaaagtaccttggcccgttgcctctgagcctactgaggacaatccccggctccggctgctttcagatcattttattcagaggccttgagattgacaggacactgtgaactctccctgtctttcttcacccaaaggcagtcccaggcttcaagcccttcccagctccctttgaagacctcatgggcccaggcaggtggtagtcaagccttgagatcagctgcaggaaccacctctcgctttggagaacactgctttctgaggtcaaggtaaggcaggctttcatccagagccatgccatgcacagctcaggtgagcactgccttacccagaccaggtgctgacacctggcagccaggtcgacatggtgtcccaagccagctc[135 bp omitted]ctccaactccctggttcaagagattctcctgcctcagcctcctgagtagctgggattacaggcgcccgccaccactcccagctaatttttgtatttttagcagagacggggtttcaccatgttggccaggatggtctcgatcccctgacctcgtgatccagaatcctggccattttagcctaatagggagcagatggtggggaatgatgcttggcttccaggagtcaggagcctgtaatattagaagtttgggacctagtctgaaatacttccatttgattccaggaggcccataaggtggagttttaaggttgttgcttcccattgccaaacaccagggtaaatcatcccctgagatggtccaagtatctaataatgatcattgaattagtgctcaaatggagagatatggcaaatggagagatatgactatatagtacttgtgttggttatgtgtgaccaaggaccttgatcttgatcctccgtattccgctggtcgttttgtacattcacagagtaagtgtgccctgggatctaattggtgaaggtttgatgattatttagctgattgtggaacataaggcactggctcagcctccaagagtcctcctgtccccaagtttctgtgaaagtttagttcatgtcggtggctgggcatggtgtctcatgcctataatcccagcactttgggaagccgaggtgggcagctaacttgaagtcaggagttcgagaccagcctggccaacatagtgaaactgtctctactaaaaatacaaaaattagctgggcatggtggcacatgcctgtagtcctagctactcgggaggctgaggcaggagagtcgcttgagcctgggacgtggaggttgcagtgagctgagatcacgccattgtactccagcctgggcaatacagtgagactccatctccaaaaaaaaaaaaaaaaaaaaagaaagaaagaaagtttagttcatgtcaaataaagcaaaatcagcatgatgtgtacattgacgtaattgaccggaggtcaagttgggcagacgaatgcacattctttgggactgcattcagcattcctgtggtccccaaatcattccccatccttgactcatctagagagtggggcacccatgctggtttctgcacaggttacaccagcttccagtgccaggaaggtgggctcccacggtgcctctgcctccatcagtggcatccctgtgctaaaacactgatgtttatcagacccttcttctctctgtaggcatattttgtaacgggacatttgatcagtacgtgtgttggcctcattcttctcctggaaatgtctctgtaccctgcccttcatacttaccttggtggagtgaaggtaataagtcttatttttaccaattttccccaaccaagtgcttttctgaagtcctcttcccccacaaacagtccccgtctaagctctcagtaatacatcttccttctgtaatttttctattcctggatgttccatttatttttatgtatgtatgtatatatttatttttatttatctttgtggttacatagtaggtgtatatatttgtggggtacatgagatgttttgatacaggcatgcaatgtgaataagcatggagaatggggtatccatcccctcaagcatttatcttttcagttacaaacaatccaattacactccttagttatttcaaaatggacgatcaagttattattattattattattattactattatatatctattttttgagatggaatctcgctctgtcgcccaggctggagtgtggtggcgcgatctcagctcactgcaacctccgcctcccaggttcaagcgattctcctgcctcagcctcccgagtagctgtgactacaggcacccacccccaccacactcggctaatttttttgtatttttagtagagacgggatttcactgtg[133 bp omitted]atcaaagagtagctcttattcattctttctattttttgtacccatcatccctccccacctccactgtcccagccgcccactacccttcccagcctctggcaaccatccttctactctctatgtccatgagttcaattgttttgatttttagatcttacaaataagtagctctcgtactttgaagcttctagagtacagatccagcagccactaaatttggctgcagtgggggtaagaatggccactgtcatggagaggagaaacaggtgggggagaaagattgggatgctaacctccacacaatttttgggttgttagatggggaagaaggattttcaaagaaccctttgcattcacattgaaaggaggtgccaataggttagtgtttttaactcccatgggacttggatggagaatttaaccacttagcttgctctgatgctgtttcaaggaagtaaacattacttagatacccaggataatatcccatccctaccagccccagaagcccaacctcttggttattttattctgaaagaggagagaggtgattactggttagattcctgttgccttttaccacagaccaccagcaaatacaaggacaactaaaactgttctcaggaaagataagtggttacaagctccaggcaaaacaaggtgagaaccagcttctgagagggtaagatgatagccttttgtatttaatttcagcccgataaatcatcccattgtgcaactttagtttcaatgttttgcgcctctagagcagagagagagagagtgtttagaaggaagatacatttctgggtgggagagttagtgacctattttatggaagtgttctctgatgaaatccagttggaatcatcccaagaagcatgagaatgtgagattttagggagggtggaagagataactcgctggatcggaggactctgaatgactcaggcacagtacccctgggagcagctcagtgagggaaaagagcactgggtgtggagtcaggagccccgaggtcagacccagtccctctgttttacactttggagactttgggcaaattcccacagccccctgagcttccacttcctcatctatgaagggaaggagagttgctaattctgaaggtcactccgaggagtcaatgagaaggcactcacagggtgcgtcgcacagctgccgcttggtccgcgggagctgaagctgaatccagggaggagccccttggattccttcaagtctagaggccccaaacacctggacttctcagtagcatgtggagccgatccctacttctctgctcactgtctacctgtccctctctgctcactgtctacctgtccctttccaagagctaaaaacacagatccattccactgtaagagaaaatgaagtgttcaaaaagccacatttacaaagaagttaaattaaagcctctttaaaaaaaaaataggttttgggcttctggaatgtgaagggagtgtgatttgcaagaggtgggaagttactcttccacccgccattctgtgcattaaatctttagaatccaaatggatccctgcagtgaagagaatgtggagaccgtggaagggcgcagaggagaacatgtgcaaatgcacagagtggaggagagtccctgtgagatgggagagaggaaggagcttggtaatatcagaagagggagcgcctggcgcctgtagtcccagctactccggaggctgaggcaggagaatggcgtgaacccgggaggcggagcctgcagtgagcccacattgcaccactgagcgcctgatggcaaacagaagctgtaactgacgactgaggctgggggctgatgacgaaggaagctgggtgttagtcactagggtttcaagctttcttctgtagaggaagattatgtggagtcccagaaggtgttaaggcataaaaatggagcacaagttgtagtctgggagaatgacattgagagcatgcagctattggacacaggaatggaggaaccaaggaggagagtggggaaactactgcagtgtcccagaaaacagcatgctaagggtctggattctggcaagggcaagagggcagagagaaggagaaagattaaagtgttggaggcagaatgctcaagacttgtcatcaattggagtagaaactgagggacagggaggagtagaaaatggaggagaggaaaacaaactcctcttccttctcctcctcctccttctccgcctctcttccccatctaaggaatggtctcagggtccacctggccccacccaagcccacatctcaaccagtgggtagccaggtcttccatctcctcctcccctccatccctcactgctgtgggctcaccagcaccctctgctgcttctccatggcctcctctccagtccctgcctcagatctggccccctccaggcacctttggaaaagctttctaaaatatcattcacattctgtctccccagcatcacgactcctacaaatggcatgcaagacctcctgctgcctggccctgctgacctcgttagcactctcccccacgttcagggttccctgcactccagcccaatgagcaactcccaggctctgcacctggtccagctcttgccactcagtaccttggctcgcacacctgcccaggaggcctcctcacaggctctggccatgctcctctgcctataaagccccttgtaattctcagctcaatcctttcctccttctagaagatttctcagacctctcccctcaactacagacctctcccctctgcctttctgaagcctctttttttttttttttggagacagagtcttgctctgttgcccaggctggagtgtgccgatcttggctcactgcaacctctgcctcctgggctcaaacaattctcctgcctcagcctcccaagtagctgggattacaggcacacatcaccataccaagctaatttgtgtatttttaatagagacagggtttcactatgttggccagg[131 bp omitted]ataatcgtttacggcgatttttctttgcactcccccagccagagctgagccctatttgtatctttgcattcccagcacaaagcattatggctagtacagacaatgcaagtgtcaagtgacattcttaccattcactcattcaactaatatttatgaagcacctgttgtatgccatgcattatttttaagtgcttgggatatattagtgacaaaaaccgagtaagatctctctcctcgtggggcttacattcttgcaggagagacagacaattatcaataagcatcataaataagtgcagactatgtttgaatgtgatctatgttaaacaagatggggaagggaagggatgggatggttggagtggggtgatgtgttgcacctgtaaactgggtagttaaggaagtcttcgatggcaaggtgacattttggtgaagatgtagaaaaggtaaaggttttagagggagggtgttcaggagggaaggagacagcaggtcaatggcgctctatgcggggaccatgcctggcctgttccatgaagagaagtaggcagatgtggctgtggtgaagaggggagagaagcaacaggttacaacagagagttacgggccagatcttagggggcttcgtgaaaggccagaagactttttctcagaaagcccttggaagatttggagagaagcatgacatggtgtggctaattttttttttttttttgagacagagtctccctctgtcacccaggctagaatgcaatggcgtgatctcagctcactgcaacctctgcctcccaggttcaagcaattctcctgcctcagcctccctagtagctgggactacaggagctcgctaccatgcctagctaattttttttttttttttgtatttttagtagagacagggtttcaccatgttggccaggctggtctcgaactcctgacctcaggtgatccacccacctcgacctcccaaagtgctggggttacaggcgtgagccaccacgcctggcctgtgtggctgatattttattcagcttgctctgactgctgggttgcccacagatgtgaggggcaggactgtcagaggagtcccatctcccggtgggaggtgatggttccacaggatggaagcaggaggtgaaagtggcagtcagattctgggtacagatgaaggcagggatgacagattagctagaggacctgaggaaggctatgagagacagaaggggagggtgactctgaagtttagggccgggggattggaaggacgggtttgccatccactgaggtggtaaaataggtgggtggagcagattttgaaaagaagaaaaagggtgtggtttggagtgtgttgtttgagatgtcaattagacaccctacctagcaaagctgtcaggggagtagggggctataccctttggttgtccattcattgaattcagcatatagttactgttggcccatgatatgcagggccaggactaggaaggaccaacagatttcgacttctcgtttgcaagctcagcctctaatcctccaggtggaggaccttctgggagagtctcctgggatagatgtgactgagtcacaatggcagtctgtatgcgcagagggatttttctcatcattttcacatacactttcatttaatcctttcccaaatcatggagagttggtaccaattattatccccagttcctgatgaaaacagaggaaggcttagaggttaggagagctaggcccaggacacactcatgcatggatggcgcatccggcttcagccccagtctgtcagccacgtgcccaccactttctcttctgcatggcatgagcctcaggaagagatgccccacctagcaagcatcaggagcccagattggcatctcccagctgggctgaaccttggagggcttataacatcactgagtcaccagaggctgttctaactccagagactttgggtaaacacagcagacattagcagaccatggtgtgttacaaaattgagaagcttccatgttttcctttccatcccaaataaacagtgaggatgttaatgagcccccaaaaggggaaatgaaaatcccttctccctgggattttccacagctctgtggcatgctcaggggaacgggctgtgtgttctgacctttcctccagagctttgtttactttcagagagctcaggaagggcctacagacactgcttggctcaggggacttggcagacgatagagaacgccacggatatttggcaggatgactccgaatgctccgagaaccacagcttcaagcaaaacgtgagtttgctcagctcagtgaggaggcatccagggtccaaaccaccctccttcgggacaccccagtggcctgctggctccaggggccacacaaagaggcttctccagcgcctctccccggggaagctaaggaaggtcccgcaaagcagcaacccttgtggcggccatggaatttcttccactactaggctgacatgcaaaatcctaagagaagtcagtcttccaggattgatcctggcatttgtgcttgctgttccccgtgcctggagcacctgtcccagctcccctgtggctggctccttctcaccatccagggttcagtccaaatatctccttcaaagagagatcttccagggtcacctaatccagagagtgccctctatggttgccacatccccccgacccaccacccaccaccccccacttcgactcctttatggcacctgcccctccctgaaattctcactgttgcttatttgttatctagccctctcatcagaatgtagatccactggtgacaggggacttgtgtgcctcgagggagtggcatagcacagggtctagggtcaggcagccctatttccattccaaatagtaagaatgttaataagcccccaaaaggggaaacgaaacgtcccttatccttgggattttccacagctctgtggcatgctcagaggaacagtctgtgtattcatatccagactctgctcttcccggctgtgaacctggtgcaagttacctcatcttcttgggcctctgcttcctcattcatgccacagggatcatatttgctacatgtgacgttgtgaggatttagtcatcagacatcagtttcttaggagaaaacctggtacacggtcagcatggtctatgcaggcactcctgccctatccccagggtctaccacagtaactggtccgcaagtccccatggcttcccaggaaaggttttttggatgaacaaacaaatccatgcttcagacttctctccacatgtgttctttccagaatccttctgcaccatactttctcgttggactcttgctcttctccctgaggacctcctgtttgtccaacatctgctcactttccttcaaagtgcaatgcaagaggctgcacaaagcggaggaacaggtgtttggggatcagacagatatctacggccacaccttggtttctttcattccgatggtcaggccacaaacagtaatgaagcatatacgatgggttaggtttttgcaccaggcactgggaataaacaggggatagcacgtggatactgcctccagggagctcagagtcttgtgatcttgtgaggcatagggacagtgtgatcgttgctgggagggaagtgtcagatgcccagggtcatggaggatggggaaactgatgcagacaggggaccaggaaggctgctcaagcctagccctgcagggtgagaaggagatggccatagtaagagagagagcaaaagggagaaacacacctagggtcaaagagctcacggggctctggggccaccttgagtgctgctgggcaggtgaggtagggcctgaggaggacacaggtggaggtagaggcctcgggagaggtaggtggtgaaggcctcctgtgcccggtgaaggacttaggactttgtatattgaagtaggagagggacataactaacttatgtgttgacagatttgtcctggcagattggagaggagtgaacttgtcaacacatgagttagttatggagatcggagactggggccatgctggaggcagaaggcagggacaacaggcaggaaccgtggcagcaactcaggccggataggaagagagcgcccaggggtggaagaagagggagggtggactcataggtttaccgaggagcaaaacggtaggacctggctggtgctggaggctgtgagagggtagagccaaggacaacaagatcgcaggcttctggcttggacccttgaggagacttaaaaatgcccctccctgagaaggatacagggagaggccttgccctttggattctcaatattttactacctaattcttttttttttttttttttttttttttttttttttttttgtgaggcagagtctcgctctgtcacctaggctggagtgcaatggcatgatcttggctcactgcaacctctgcctcccgggttcaagcaattctcctgcctcagcctcccaagtacctgggactacaggtgcgtgccaccacgcccgtctaatttttatatctttagtagagacggggtttcaccatgttgtccaggctggtctcgaactcctgacctcaggtgatccacccgccttggcctcccaaagtgctgggattacaggcatgggccaccgtgcctggtcctttctacctaattctgtgccctaatttgaacctgcaaaacacccccactctccgccactcccaagttgtggctttttttttttttgagatagagtctgtctctgttccccagggtggagtgcagtgacgcgatcatggcccaccacagcctccaccttccaggctcaagtgatcctcccacctcagcctcctgagtagctgggactacaggtgcacaccaccacatctggtattttttgtagagacagggtttcaccatattgcccaggctgaattgtggctttatttcatgatttagttggaattctttagctctctaaagtcatttaaatattatcccattaaatgttaaagatattctatacaataaagtctggggacaggggaaggcaaggagttcagttttagaaacactattcttgtcacgggagccacctagcctctctgcaggcatcgtaagatggggttgaaaatacccgctttgcaggcttagttgtgaggcttcagagggcaatgaatgtggagtgattcatccacctcctggcacacaataggcatttgatagttgtgattattgcgtttcttttcttttcagactatcttccctggaccctacaaacacttctctccctccctggcctctctggttcagtcctagggctgtgatcatagttcacttgtcattgtgagttttttggtgtctgtgatggtagcttttctgcattggctatttggttggatttatgtgtgtgtgtgcgtgtgtgtgtgtgtgtgtgtgtgtgtaatatttcatttgactttcaaaagccaaaaacctagctttttgttaagttattaaggtcaatgctatttcatatagttttttattctatttataaatctagtaagttagtctactttcgtagaggtctctgattaatttttgttgacacaaacaagttatttacatatccttttacattttaagctgcgctattacatttgatatgctttagacatttaaactatgttaaataattgttataataagaaaatctttcttattttaaaataattctagttcatcgaatacatcaactttatatgttgagtcttaaattttcctaaatatgtcaatactgttttcatcacggtttcaacttaaagttgaaaatcaagtacgctttgatgtatttcatattggaagcttaatactaacctattaggtcctctaatatgtcatattctctaaataataccaattgcatacagattgtgcaagtaatttaaaaaactgctatatgagggatagaccaaggggtagatatggggcgataccacataaagtttaatgtttgttagaggccagctgcagtagctcaggcctgtaatcccagcgctttgggaagctgaagtgggagggttgctggagcccaggagtttgagatcagcctgggcaacacggcgaaaccccatctctaaaaaatcaatacaaaaattagctgggcatggtggtgtgcacctgtagtcccagctacttgggaggctgatgtgggaggatcacttaagccccaggaggttgagactgtaatgagctacgattgtgccactgcactccagctttggtgacagagtgagactctgtctcaaaaaacaacgaacaaacaaaaaacagtttaatgttagaatctaagtggtggatatacagatgttctttataaagtttctttaactttggtgtatgtttgaaattttcataataaatattgaggacaaataaaaaaattctatacctgaatttaacacaaaacattaatcaatgtagtggtgcgatcaaaccttgccaagattaagacacaaaacaaacactttcacactaaggagacaaactggtccaagaaagtaggggtttccatctcaggagacatggttgcctgtagaccaagatttgtttgttctggttgtcaataccagtggtgtaggtgtgttagtaaatgttaacaacaggctccctgcttccactcctgaagaaagaaaggctaggatttgttaacacttgccaattttggtggcattaatgccccccatggccaatttcaagctaccagtgtgaccgcagaggatgcacagtagcgcagcgttagacatgtttctcctcatgcagatacaacagcaaaaataaccccagtggcactgaacacagacatgtagaaatgtaattaggaagtgatgaatttggagtatttattgcttttattctgaatataatttattcattgtaaatttacatcatttaatttttttttctttttttttgaaacggagtttcgctcttgttgcccaagctggaatgcagtggcacgatctcggctcactgcaacctccgccttccggtttcaagcgattcttctgcctcagcctccagagtagctgggactacaggggcacgctgccacacccggcaatgttttgtatttttagtggagacggggtttcaccatgttggccaggctggtctcgaatgcctgacctcgtgatctgtccgcctcagcctcccaaagtgctgggattacaggtgtgagccaccgcgcccggccatcgtttaatttttaagaatgctcatgttttgcaactggttccctgaaaatttgccaatcagttctcacaagccaggatgaccgtaccactgggtctaccagggtgacttttttcactcttgccaacaagttgagccccaggttcatgtccattagagaaggctgatcgtattcaggttctacacgtttcataaactagctatttggtctaacaggagccatctggttcgggctctgttccttcagagcctcgtgggtgttggcatgtccttggctcccttaagtgtatcctaatcttccatcaaggcgcagtggctcataagtatgatcccagtgctttgggaggctgaggcgggagggctgcttgaggccaggagtttgagaccagcctgctcaacatagcaagattccatgtctaatcttccatcagacgtgaagaaccttcaactggatactccacatcctcagggaattctgtctaaacctcttactttcctactggatttgagttaacagaatcctgtgatccttatacagttttactgtgtgagatatcacacctcttaaagggatcagaaggacacctgtagttggattagatccggtttatctcaagaatttgtctgacttttttcacatcaaagttgtgctaatggcatgccttgaattaggcaaactgtgtattttttttctcctgggcttcaaactgtttgagaacaacaacaaagtcacagttatatttgactatcacccccaaacctctgacctagtactgaggtgcacagtggcctttgcatacagtaggcacttaataaatactacatgaatggcttcacaaattctgagccaattggtctgtaggggggtccagccatcaatactagttccaaagttccccagatgattctaatatgcagccaaggttgagaaccacaagtgtgcggacacagtagcaccatccccaagtcagcaaatggggagcgctaagcaagatttgaaaactgcgctttcaaaaacaggaagtaaagatttctctcttcggaaaagtgaggacaagagcattgcctcctcccctctgcaaatggccatatttccaagaattcaaatacttaacaaaaaaaacaacttctggccatgtttacctgtgtttctaatagagggttgaaattttgcccaaaaaaggccagtgttagtaaatctttgcccttcagagttttggcaaacaaaatatgttatgttcttccaactaacgagatgctgggggtccttatgcatgttaaatggcacttttaaaggagattgtgtgtgtgtgtgtgtgtgtgtgtgtgcgctcacataagcattaacaagtgtgtttagatgacttagtatggaattgcgtttaatggaatgaaaataaattactatgccttactttgtcctttaaaaagtgcgtctattcttaaatacataatttaattaatacatacatatgaattcatatatctgtatataattttaatatatggcatataattttaataatacgtttaaaattttaatataatttataatatatccattgattatatatgatttttccaacattttattttgaaatattgaaacatatagaaaaattaaaagaataatatagtagacactcatatacccagtatttagattcaaaatgtaataacattttgccacatttgctttctctctgtttctttctgaaatattcaaaactaatttgtagacatcatgagatttcacccctaaattcatcgggtacctcctaagattaaggacatcattctacacaactacattaccattatttcaaccaagtaaaattaacagtgatttttatcacatggcctatttcatccatatttaatattttttccaattgttttcccaaacttttatagcttttctgccctagaaatatttctctctctttcttacagctggatagtatttcacttagcatatccaccagtttgtt[167 bp omitted]gcctcagcctcccgagtagctgggactacaggcgcccgccaccacgctcggctaatttttttgtatttttagtagagacagtgttt[132 bp omitted]acagtgaataatctcagatgtttatgttggcttatatttgtggcagtatatcttttggaagatttctagaagtgggatcactggattaaaggcaggtgcatatataattttgttagacattgccatcggggttatacatttgtcctcccttcaactatgtatgagagtacctgtttcctcgttgggtgcgtatcacatattggttaggaagcttctcataaaggtgtctaagtgacataagattcacctgttggtactaagcgtgagctggagacctgatgttttggagcctctaggaaagtagccaggttttgttagagaccttaatgtagaggacagttgaacaaaatcctgtaaaaaagtacaattaaaccaactgtagcaggtgctcttggcgccctgcccgtatccctttgccctaatcaattcagtacacagctgcttaacttcttaccacaagtgcatgcatttctttgctggttctctggttcctgaagcccacttgttcgttgaaatgcaggccataagtgccatgaaattaatgtgccttggaagtcaccttcaatcgatgactggcaagatttggtatgtttctataccaactcccttggtcttggggttagttgactctgaggattccagagcttccccagtgggattaagctccagcttcccaccatggtagctggcttgataacccatgctttatttgtgctaagtgctcccttaccctaccgatgattttttcactttttttttttttttttgagccgggatctctctctctctcacccaggctggagtgcaatggtgcaatattggctcactgcaacctccacctccagggttccagtgattctcctgcctcagcctcctgagtagctgggaatacaggcgcacaccaccatgcccagctaatttttgtatttttagtagagatggggtttgccatgttggccaggttggtctcgaactcctgaactcaggtgatcctcctgcctgggcctcccaaagtgctgggattacaggcttgtgaagcaccatgcccagctgatttttttttcactttctatgcaagctgcctgcattccaattcttgtctcaggatctgcttcttggaaacccaaactaattaggacacagacaaaaaaaagacatgtcccctaatttgttcctagaaagcacaaaacacacacgtgttttaaaaatcataatttagaaacaaatagttaggttatttaattaaatgtgttagcctcatatctccaataaaataaatcatgctattcgacccagtaatgtcttgatatgccacagaaatagtcaatttaaagaaactacaccactctgtgtgcagaagcacaaaacacttctttactttcaaggtgtttcatagtctatctggaaagacaagatgaatgaaagcaaagcattattgaataatacaattgacaccctatttgtgaaacaaaccacaagtactttgacaataagagttgacaataagcagagagacatttgaggaggatttcttatagggggtaggtttgtgctggtcttagagggaaagacttagtttcaaggagaggcaaacaagcacagttggagactgacaagattgtagggatctagatgaagtccatagagaataattctagagagaaacgtggttgggattgatctggaagagctcaaagtctacaccgagagttctgcctccagaccaccactgcaaaaaatgataacagagaaagaaaaaaacatacgacatagacattttaatctacaaaaaggaatgaagaacactagaaatagtacatataaaggtaaatttttatctcatttaaaaaatgttctaaaaagagaaataaatttagtttttaaaatcacacaaaatatattagaaatcaaaaacagtaagttgcttggaaaattccccaaatattaaaaaaaaaataacaacatacttctaaataacccatgagtcaagtaaaaaagtataaaataaattagtaaatattttaactaaataaagacaaaaatacaatatgccaataattttgtgatgcaaccaaagcagtcatggagagaaatgtatagcatttgtttttttttttgtttttttttttactttaagttctgggatacatgtgcagaacgggcaggtttgttacataagtatacatgtgccatggtggtttgctgcacccatcaacccatcatctaggttttaagccccacatgcattaggtatttgctgtaatgctctctctccccttggccccaaccccctgacaggcccccgtgtgtgatgttcccctctctgtgtccatgtgttctcattgtttaacttccacttatgagtgaggacgtgtggtatttggttttctgttcctgtgttagtttgctgagaatgatggcttccagtttcatccatgcccctgcaaaggacatgaactcattcttttttatggctgcatagtattccatggtgtatatgtgccacattttctttatccaatctatagcattcttatattagaaaattggaaaaatatcaagtcagtggcctaactgccatcttaagaaactaggaaaaaaacctcagcaaattaaactcaaagtaagcaaaagaaaagaattacaaagtatgaatagaatttaattaaatggaaaacggaaagacaatatgaaaataaataaataaaacccaaacttggttatttaatcttggtgttgatggttttgagtcttttccattctggtttgatttttgtgcatttttgcctggagtgtttcatagatttctccactgctgctttttcttcagtttcctcatcaaaatcatcatcttcttcaacatcatcatcttcatcatcatcatcatcttctccatcagcaggaagttttaattttttctgtggaaacttgctaccacttccaggggcagattactttccagatatacttaagagtttcacattcttctcctcttcatcttctgactctgcatcttcctaagtgctgtccactaataggcatctgctctgaaccacactcttcaactgtaagaccgtgggtggtgtgatttcaaagcccccatggaaaccattggctgtacagacattttcaaagtcgccagtgttactttaattggactgccttcgtcattcattgtctctgcgtcaacaatgtgcaatcatgctttgcaccagccctcaaactgacaattcttaaagataagtggtgttccttttcatcattgtccgccttaaagggatcgtctttgtcggcctttagttcacaactgaaaacatagttctggggcctccgggggctcatgtccatctccatcgagtcctccatggggtggtggcacgtacttaggtgggagaaaaggtggacagagataaatgactgctgctccagggaacagctgtgcaggacggaatcacaccagccaaacttggttacttaagaagatcaataaatttggtaaacctctagaaagatgaacttaaaaaagggaaagaattaaagatgagagagagaaagtgagagagaggtcaggagttatattaagagagatggaacatcactactgatactttatagacattagaaggataataagagatttttgatgaatgcctttttgccaataatttctacatgttggatacaataatttttttaaaagaaacaaactacaaaatttcactaaagaaggaatggataaccagaatagtcctatatctattattaaaattgccttgcagttaaaattctctcacagagaaaaacctcggacctatttaactccaatggtgaattctaccaaatatataaagttaaaataatgccaattctacatgaactctccagaaaattgaaaaggaggaactacttcccaactcagctatgtggccaagaccagacaaacacattacaagaaaataaaactacagaccaaaatctctcatgaacatagaacaaaaaaatcgcatttaataacacaaaatttctagtaaattatcctgtgttcacaatcaggcgacctgggactcagagaaaatattgcaatgtttcattgagtcttcttccaagaggtcatctatgaagacttactttacaaaggaaacattcagacagaaatttggccctgtcctccagaaggaaggacccatagaccctagggacagtgctcccaagggcaaagagcctgttctcattcccaaggcatcctcttgttctgaacgcaattcctttatgatattgtggctcttggtgtatcagtgctgggctgtgggcccagtcacaggggtgagacccaccgtgggctcttcacttgttaaggctccttggcctctgagatgtaccagagagcaatctaaactaccctatttgggtgtcaacaaggatggggaaggaaacatttaaaaaaatgttgggagtccatgcctaggcccttggtggccctgggtgtggagctgggggttgtggccatagccccatggcttagtggtcatgtctgctcttcctctgtgttcaggtggatcgttatgccttgctgtcaaccttgcagctgatgtacaccgtgggatactccttctctcttatctccctcttcctggctctcaccctcctcttgtttcttcggtgagtagaacttctgcaggcatgtgttcgggcaggtatagtagccctccttcatctacaggggatatgttctaagagttccagtagatgcctgaaaccaggggtagaacgaaacatagtgttcaaaccagggatagaaccaaccctatgtttggttctatctccatgttttttcctatacatacatacctctgataaagtttaatttataaattaggcacagtgagagattaacagcaataaccaatattgaaatagaacaattataatgctatactataataagagttatgtgaatgtggcctctctctaaatatcattacactatgttcacccttctttttgtgatgatcaaggaatggagctggtcaaggttagatttcatcactttactcagaacagcacataatttaaaactcatgaactatttatttaattatttatttctggaagtttttcgtttaatatttttgagccgcagtgcaccatgattgactgcaggtaactaaaacagtggaaaacaaaagtgtggataatgggggaactatggtattgtgtaatttgctcattggctacctctagaaggcactggaagactgggctggatgtgtcatgaatcatcaaagctggaaatgaccagagagaggctaagtccaatccatcccattttgcagaagaaggggaagaaagggatggcaatgtcccaatcagaggcattgagtcacctctggccataaagccagttggctacacagctagaatttgaacccaagactcctgacagctttacctcctttggattagacacctgctgtgcgcccggccctggtgtaaatccctaatcacacccattaccaccacagcccattcccactacaactcaatcagaggcattctttttacagaagagattaagaatcttccccaaggtaaacaaatggatggaagagctgggatttcaattcagggccctcagatgtcaattagctatcaaatttaagtgcttactcctaagcgcattacatgcattaagtcgtttaaatgtcatccctaattcaaattaggattcattctattcctgggaggttagcattattattacccccactttagacgtgagttaactgaaatatagagagatgaagtaacttgcccaagatcaccggctggtgggtgatgaagccaggatcacaaacaagcagtctaggatctgagcactttcactccctaaactttcagtattccaaagcctgtgtgccttttactaaatcatgcttttagaaatcaggcaagtgagacatttatggacccactagaaagctctccaaagctgtctctggtctcaggaatgtaagcggatataatgtggcagaatgagcatttgacataggtgtgggagacctggaaaccagctccagagcacctctccacctgggctctgctagccctgggttgggcctcatgtgactcctcaatcctgagatgttctgcagctcctagggtaaagtcatgaccatctaccccattgggagaaccatgcttgagctatgggagaactctgcaacttgtacacactgattatctgtgacctccttccttcatgccctgtcccaaagtcccaggaccaagccaggagaaaataactgcccagccctgtaggaagtcacttcggccaagcctgggacaaccaagtgtcagttctgcctaaggcttggggaaaagtgaggcccagtcgctgccctcaaatagcccccagtctagttagagagaagaatgtgtaaatcctaagacacaagaacctgcctcaggtccttttagaaactaaaaatataacaatagctttaaagcaatataggacagggtgtgtgctacccagggagcacagctttcctctggtgacagcaaggatgcacaatgtcacatcacacacaaagagtctgcaggagaccccaggtgcataaggaagaggtgatgagagctaacatttttctggacacttacttatgtgcacagattaacggatttaatcattccacaacccctggaggtaagtgctcttgttctcagaggcagaagaaactgggagacctatgctttggcctgagagtttctgtgtctgaatcccaactctgcgacttactgctctgggactttggacagatgacttcatccttctgctttaattctttcatttataaaatcagggtaataataattcctatacctccagtggtggtaaggagtaagaatactcaaatgtagctgcatatgtaaatgatttggaacacggctggcatgttgaagatgttttgtaggtgatagctattttttttttttctgaggtgaagtctcgctctgttgccaggctggcgtgcagtggcgtgatctaggctcactgcaacctccgactccctggttcaagcaattcttctgcctcagcctcccaagtagctgggattacaggcacgcgccaccacacccagctaacttttgtattattagtagaggtggggtttcaccatgttggccagggtggtctcgatctcctgacgtcatgatccgcctgtctcggcctccaaagtgctgggattacaggtgtgagccaccgcgcctggccggtgataactattattactctcattttacaaatgacgaaactgaggcacagagatttacggtcacataatccagcagtccagctctgcagcctatactatgaccctctgtctttagtgatagatacacaggcataaaaggcagaggcctgttggttggagccattctttcctgagggaaggcatttggttttctcctcgcacagaaaactccactgcacgcgcaactacatccacatgaacttgtttgcttctttcatcctgagaaccctggctgtactggtgaaggacgtcgtcttctacaactcttactccaagaggcctgacaatgagaatgggtggatgtcctacctgtcagaggtaatccccttccccactgtttacactggactccccacctgatgggtcagtactgggaatcagaaggcaggcaggtgggactagggaggggcagcgggagataagagggtttccaagactttctggctagagaagtagtacgtgacttaacaaaaccaccacctgccaagagcaggccaggtgaaagaaaccaaaacagaagggttcaccatggctgctgtatgtccttgggtgggaatttcttcatgtgcaaacaaaagaattggaccagatcaacgtattttacaattatagctggccctctgtatccgtgagttctgcattcatgaatttaaccaactggggatagaagatacctgggaataaaaagggtgattgcgtctgacctgaacatgtacagacttttttttccttgtcattattccctaaacaatacagtataacaactattcacatagcgtttacattgcattaagtattacaagcaatctagcgatgatttaaagtatatgaaaggatgtgcataggttataggcaaatattccaccattttatagaagggacttgagcatctgtggattttggtatccacagggggtcctagaaacaatcccccaaggatactgagggacaattgtactattttcttgaagcagcaatgctttttcacattgaaatctgcatctattgagatagtttttcctttatcctgctaatgacgcagtaacctattaaactaaccttgcattcctggaataaatccaactaggttttgacatattattttctttctcctaagttgctgtctttagttcgctaatactgtgttttgttgagtatttccttgttgccattcatgagaaagattggcttgtaatgcctttgtcaggttggggatcaaatttgtgctagcctcgtaaaacaaattagagctggtttcctctttcactattctctggaagaatgtattaaagataagtattatttcttccttaaatgtttgatagattgtgccaattaagcattttggacccagaggtttctttattggtaagttttaaactatggattaattacgaatctaatatccagattctatttcttctgtcagctatagcaaatgagtttttctaggaattcatctatttcatctaactgttcgaatttattggcataatattgttcatgatattctctttggatctttttcaagtccattggatctgtaagagtgttctcattttcattcctgatattgattatttgtatctttgctcttttttctaccctttgatcatgttggcaacaagtttctcaactttattggacttttcaaagaataaacttttggcattgttgattatctttatctcatgttctctatttcattaacttctgcttttattatttcctcccatgtactttctttgggcttaatttgctattctttttctaacttttttttacatgatccttaaaataattgatattcagcatttttcttttttaaaaaatgcacttaaggctatacgttttattatataaggtttggtattaaccgtatgttgtaagttcatgcaatattttctttacattcagttaagaaataatttctaatttgtttcaattttttctttgatccatggattgcttagaagtctattttctaatttccaatcatatgaacattttttagttattgattttagcttaattgaactgaggttagagtactcttcagtgtttccattagggcagttgctgatggtgaattttctacatttttgtttgtctaaaaatgtctagaatgttaaggaggaggctggccttgaacacctacctgaagccctccttccttcatattttgatattattgccaacctccctgagatggtcagcaaaggtctgggagagaacagagtaaagagggaggg[142 bp omitted]acatacatatacaaaaattagctaggtgtggtggcacttgcctgtaatcctagctactcggggggctgacgcaggagaatcacttgaaccagggagctggaggttgcag[133 bp omitted]gatgcaggggagcctggactcaccctcaggtgttttttcctctgcagatgtccacctcctgccgctcagtccaggttctcttgcattactttgtgggtgccaattacttatggctgctggttgaaggcctctacctccacacgctgctggagcccacagtgcttcctgagaggcggctgtggcccagatacctgctgttgggttggggtgagtgacctgaccttcagcttcctttcctggggatccatcaaaatatgggagcctgatagagactttagttggacttagaaacctaactggaggttgcttctgggacatataagtcctcaaagacagggagctttgaagaggggtatgtgtgtgcacacaaatgcacacatatgcacaggggccataggcccaacagcccaatggacacattcaaaaattgagaaagtctttggtggaatctgatgatattcctcctaccctgtccccaactgtattagtctgcttggaatgtcaaaacaaaatacctgtgtagtttaaataacagacattgatttcctatggttctggagggtgggaagttcaccatggttgggttctggtgagggctcttttcctggcttgcagtcagctgccttcttcctgtattctcacatggtgaggagagtgagaaagcaagctctctcgtctctttttaaaagggcactaatcctgtcatgaggaccccaccctcatgatctcagctaaacctaagtaagtactaccaaaggctctgtctccaaataccatcactggggtagggcttcaacatctgacttttgagaggacacctacatttagtccataataccaggtcttcaagaagagttttctgattaaaaaaatatgaccaagagtatctagatttggaccccctacctccacaaaccctttggagaatttggtgctacaggattcagaggaaataacctgggccagtaattcaggagattcgggttaatatccttggatttattctcagctgctttgtgacaagtatccagtcgctttccccctctgggccctggtttcttgggtggtaaaacaatggatgggccatgtgccaccctgggtctctccagctctcacagtccacaactccatgatgttaggtttgatgttgtaaccacctgtggttagcctcatccgctgtggtgggaggcaagcaggtttggccaaccaactcctaactacatttccctgtgttttctccccagccttccctgtgctatttgttgtaccctggggtttcgcccgtgcacacctggagaacacagggtaggtaattcaccaggtgttattctttcacgagccggtaattcccaggcatgcctaaatacaaagaatgacatcattttaccgtagaaaatatctatcccttctcattttggccatctagaatattcttaggaatgggagataaaataatcagagatcttatagcaattagtttattaatttagttacacatgcaaattagctcaaagatgctgtataggttagctgcagccctgggtacgtaaggacaaaaatacaagagtggttactgcagtattgttcatagtgagaaaaaaaattaacaaaactaaacaaacaaaaaaccactgaatgctcatcaatatgggaatcattgaacaaactgtaatatacctatattgcagaatattatgaaactacttaaagaaaagcaagttcgttattatgggaacttttaggcactgattctcaacagcctgttttaagcctattgctgaaacgtatattgtgtgatcccatttttttcctccaaatagcacacacaaaaaactacataattaggaatttatgtttgtatgaacatggaggaaaattttggaaagatatacacactaggctgttaccactgaagagcaatttaatggtaaggaaagtaaactgtaccagtactaacaggaagggatttgggttctctcttctgcctctcccacccctcaggggactgattggtgggaagtagggcttgagtgcaagcatccttcttccagagagcatgaggctttgactttcaacctcctcttgtttttaagtcttctactgcctgcttctactgttgaccttaggtgctggacaacaaatgggaataagaaaatctggtggatcatccgaggacccatgatgctctgtgtaacagtaaggaccatcccatccacctctttgtctcggagcctagcagctgtggggaatccccccgccccacccgacttctgtcccccaggttctctgatcccttgagagagagaagctgaactatgagcattttctgctgaatgagaagttagaagtttcttgctctggttcaggacctcaatttggagttacattgtaagcctccttctctctgggtcttcaaactgtgtaaagagacctgcagtcagctctgtgctcctgtattgaagggctgagatgtgtgcaaggccctgaggataccaatgcctttagtcatggaggaacccagaatagcaggggtatcggcttatatcctaacaccatccacaggagggaggaagagactaagggaacttcttttagaggaagaaaacacacaattaatattaacccaaaattgtgatgcagcttagaatcaagacatagatgctactctgagaccttagggaggaaggacctttaatcattgtggtccagaatatttggaatggaaagggatggccaatccagagtcaaaaattcctttagataatagggtgtgagaatgagaactgtcaaagaagctagcaggaaggggcagaaagttagcaaacactgggaagggttagcaagatcccagagggaggcggaaagtattcctgcctagacacaccaccataatcttcgcgtgcccaccaggtgctgaacactacgtgttgttctctgcccaccctgttccccaaggggttgctggatgatctgtttttgccattttatataaataatctggcatttgtggtaccatcaaagaaaaaggctagtttttataggggagtttcaatatttgtcaataatagaaggcaactctctgtttagacctgggtgtgacctggagggaaaaatggtcctagaagtggtgggaaaaccgagagtgtggacaggcctgtgtcatctctggtctatgaggtggcacgtatgctgcggtatcttccctcctgtcactggacctgcagctgatagtgtgccagatgaggtctgggcacacacaccccacacatggtgtgcttagccctgccacatcctcctgccctccacagtcctctctccagccacactgcccagctggggtcctgtctggacaattccaccaacgtcccagaaacatttattaagcacttctgcataccagctccatttgtaagtgctttgtgtatgagtgtatgaactcatttaatcttcccaaccaacctgtgaagatatgccattcttaggtttattttactggtgagcacactgagatgagaaattacttgcctaaaatcatagagccagtcaatggaaactggatctcagcccaaagggtgtgatgggatgacagctggcacttttaaccgtagcactgtgcagctcaaaaactatttactgcctccagcccccacgcctgccatactgaatgctgcaggctcttttgcaccttagtaccttggttcagactctcctctggctccaactccttccctcgccatcttttccacctggtgatctgttcctcatctttcaagtcttgggtcaggcatcattctctctgtgctgctctacctggatgctcacctcacgaagtgaaaatggccacactctcctttgttccttcccagatcctgtgcaggcttctgctccagccctagccaacaccatttcaagtatctctttaaaacccattttctgccactgtaagccccatgttctgatcatcctggcagccagcccaagcatatggtgggttcttgataaacatattcagtgcacactcatggcctacattctggaccctgaaaggttcttgctaaccaggtagaacaaagtagaatggaggccagcagccatccctaggatagcgttgaggcatggtccagctggatccctagtgtttacttgcagtcttctaggagctacaccaatggttctcaaactgggttgctcttggaatcccctgggtgtctttaaaaattctttttgcctgagtcccacccccagacatttatgtttcattgatctcaggaggggcctgagttgaaaagcatgttgctacaaccttgcttttcaaaggatggtcctcagaccgggtagcaccagcatcgcctgagcgcttgttataaattcaggttctccagccccatctcccaggcctactgaatccgagtctgcattggaacaagctccccaggttttggatgaacattaaagtttgtgaacctctttgtctactcctggagttctcaaaactggttgtatgttagaaacatcatggcggcttataccccagacctatgacattagaaattctgggagtggggcctaggcactgtagttttttctgtttttttgtttgtttgtttgtttgtttgtttgttttgttttttgttttttgtttttttgagacggagtcttgctttgtcacccaggctggaatgcagcagtgcaatcttgactcactgcaacctctgcttcctgggttcaagcgattcttgtgcctcagcctccctagtagttgggactacaggcttccaccaccacacccggctaatttttgtatttttagtagagatggggtttcaccatgttggtcaggctggtctcgaactcctgacctcaagcaatctacccacctcggcctcccagactgctgggatttcaggcatgagccaccgtgtctggccccactgtagttttaaaacccctgaaatgatcctagtggctagaactactgctttgggccttgctgctttggccttctatggctggctgacccgcattctagtttcccttggtgcttcctagttgggacaagagaacatgctctatcttctcactttggataaaatgacctttacatgctgttgcttctgtgactccagtcatggtcagctctactgaaatggccactctcaccttagcttgtggtggactcctcatcttcccattcagacctctccttctcctactcactctacccagaaaatggctccaccacccacccacccaggcacccaagctggaaagcttggtgttctcctaacttctgtcctcttcctccctgcaacgtctattcagacttcaagtcctgtcaattcttcttctaaagatctctccaagccatttccttctccttaatcccttggtctctgctcttctttagccccttgtgattttgtgtgtgtgtgtgtgtgtgtgcagacctctgcaaacacctcctttttggtctctcttcttcattcttgcccctgacaatccatcctcttgttgcagcccaagtgatctttttggagtaaaatttgattatgtctctgttctacttgactgtttaatgggtcactatttccctcagatctggttctaaactccttagagtcattccctctctactcacctaaccagaattgcccgatgctctactcgtatggatacatttaaagttctccaattccaccatggtgtttccctcctcccatgcacacataagcctcaagtgcctgttggatggccccaggtctgcctgataaattctctttctccttggaaactgagtcctttattaatctctctatcccctaccctccacccccctgcaattaaaataagtcaacaggcatgcctagaagggaatatttcacaatcaccctcagctcttagagaggacattgcttaactattgttgtctgtgtctacaggcacttggactagaggaaacgggcttgaagagaaatgggagcattccctttggtcacaaggaagacatttaaccatgaacttgtaaaacactgacatataccccagagaaaggcattagatcttcatgtctatcagtttacaagaagataatctgtcctgaacaataaggagctaaacctgctgccctcccaatctgcacagctctaggattctaggactctgtgcattggttctagggctccccagagagtggaatttatgtgtcccaccagacatggaagggaaaagaaaggccatgcagaaagaagtgaaagaggcaggctaggagtcaggagcctgggctctatgactgacttgtgatgtgtccttcagccaggtgagttggcctctctgggcctctgtttcttcatctatgaaatcagtcttgaactagaccagtggttttcaaccagaggagattctgacccctggggacatttggctgtgtctggagacatttttaattgtcataaattggggatggggataggaggagaatgttgctactggcatctagtgggtggaggtcagggatgctgctcaacaccctacaacacacagaaccacccccagaataaataattatcctgccccaaatattaagagtgccaacattgaaaaaccctggactagacagtagctgcacattaaaacaacctggggaggattaaaaaaatacccagcccagacttacccagactgatggaatcaaatctcctgccatgtagagcttccttagcactggaatctcattcagccactctcttgtatcttcctttagcattcattgagcaccttcactgggcttggcttggtgctaggttatttcagagtttctatcctcagggaattcagaatttaatagttatcattctgagactcatcagactatgactgaaccaatatctgccttcatttttggtcatatgaccacatgttgcaattttccactgatctgaatagacataaccccaactctaaaagagaattccttaaaccacaacgtggaaggaacctggattcctgaatgactgtatggagcagaactccctccactgcactagactgtgacataaccaataaaataaaataagataaaataaatctttattgtgttaagaaaaaaataataattctttggcccccacatatgttctacttaaactgaagtaagaaagagtaacaataatcaagactgagctagtagcacttggcatttctaggtacttaacaattttctttcaacttggtcaaatttgagcctgggcccaattttggggaacatggatcagaggcttctgaggaaaagccaactgtgcatggtgaaccaagcactgggaccaaggagagtgtcccatcccaggttccggctccctggtgaatatccctagttatcacagttggatctctcccaccatcccctagactgggtctgcatttgctgaccagcatctgggttgatgcgagtgtacaacatgctggaaatccagatgcgtcagcaaacttcatttactgctttgttggtacaaggttgcctgtgtttcagaaatgaccataatgtggcaacctgaagaatccagatgccctttgggtctcttgccaggcagaaattgtagaattcccacctctttctttgtataagacttcactacttcacctgtcatctgaaatgtacatttagagttgaatcatctcggaaactggcatattcttacagcctagtctccccagccctcagtagaatattggtaaagtcttgattagtcctgctcaaggacagccttagacaataattacatcatgcaaggtcattctatccataccctgcaccctgcagttaacagacccggtgaaatggctgttttgagctaacaaattgaatgaaccatctgttgactttatgaaatcataaagtcaaaagcctgcatttgctattgttgaatcttccgtgatagcctcagaacttggcaaagttgatgcactggtaaaatttgtcttcactggccttgtccctctttaggtcctctgccccaccaggaacccaggggctttctgtggcttcaggcttcccaagacatttcctcactcctgtgctctcctcttctaaagacttaaagtgtgactctccctgtactctgggttttcccaccccatcaaaacttagctttgctacaccccatcttctgctttaaatggtgataataagccagagcctaggtaacttactgaagtcttcattgttgcaaaaatgaatgaatgaatgaaaggagaaagggcttccttcctcctctcccagtgattccttagcttcagtgggttgtgtgcctttcagcagggctcttggggaaagagtgttttgactcacaagagtagctctacaggattagcattttagtccacacagcaggccagaggaggaggggtttggcggtagatggaagagtttaggggtagatgaggcctacccctgagctcccgctataccggcaatcacctctgccaacttgtaggcccagatctgtgcacagaagctggggtaacaagaaagtgtcaccaagaatgtcacatctgagaatgcatctgggatagatccttatatatttggggtccttagcacccacccccatctggtcacaaaatcctggaggagttggctgggttcttggaaaatgtcctcactcagcccctttcctgcttgtgtgaaaatgaagaacagcaccatccaaaagtacctgctgactcttgtcttcttggaagcccagatgagcagaggcttcatggtacccccagctagggtttcatcctgtggcagtgaggaagtgcctccttcgtacgttctatgggttgatgcccattttctcatgtctggtctctggaagacacagagaacagtgaatcaacatgcttcccattataacctttcattgcctaggagacagtcctgattgaaattaatttgctgaaataaatgcctttctgctgttaagcttgctttgtaagaaaaatgcctatgttcaataaatcactaagccaaggacacaacgttttctctttatgatgagaggcagatatcccattaaaagaaatacattacttgattacatttaccttgtatttaaactttctgttcctaaatattctttggctaggaacctccatcattcctgctggcttcaggccctcacatccagtcaataacaaagatcatttgactcatacttcttcatcatttcaaattgatcccttcctctccatcatggaagcaccagaactgctgctgatttcttttctccatcaccgtcccccaggaactctgaaactacttcccaactgatctcccctcctccagccttaccctcacccaatccattctccacactgctgctgaaattatctttctgaaatgcagaagtacaaatctgatcaggtcacttgcgtgcttaaaatctatcactggctcttcattgctttcagaagaaaacccaaactccttacctaccacggctgtgaaagaccctgcagaaacggacccccctctcctgcccagtctcacttctcacaaaccctgttctcattctccaagctctacccaaacccagccacctgcttttcaccacttccagggggctcttgatctctcccgaggctgcagccaagacggcagccagggccgcagccatctgaaggcttggctggggctggaggatcagctcccaaggtggcgcacacacgtagctggtggtgggtggtgctggttttgggcctgagaactcagttaccccacgtggatctcccaacaggctgcttgagtgtcttcacaaaatggtggctgacttcccctggagtgagaaacctaagagagagagagagagaaagagagagctgggtggaagccagccatccttttgaggacctagcccagaagtcacatagcaccacttctatgacaccatattcttttcgttaagtgcaagtaactaaatctagctcacctcacaaggggaataagggggattagcctccacttttgaaggcagaagggccaaggaatttgcaggcatatttttaaatttctttaaaggctgacaatggagggctggattttcccagtccatgacagtcgtggaatgtattctagggagtagagagcatattctgtctatgaattccatagcagcaacaggatctcaagttagacaccaatagggatggagttctttacagaagagaggcagaatagcgttctgtttaagtgaagggagggttataatcccatgaatctgggtttaattacaggcttaatcactgactagccatgcaacctgggaattacacttacttctctgtgcctgttttctcattgttttatgaggataaaaatagttgtggctaccttaaggggatgttgtaaaaactagatacaagaatgcctggaccattcttagcccaaagcctgacatggtgctaagtactaagtgataagtactcaatacgtggtagttaataataataacaataatagtaataataataatgtgaacgtccacctgcctttctagatggccttaatgatgggcctccttaaggcagaataataaactaaatcactttctgaaattccttccagactttcagttcagatgacctttgggactttggagattcagatggcctttgggacagtggagattcagatggcctttaggacagtggagatcacagctaagcatttactacctggccagctaactgctgaattgcccctggtttacattgaactgatggaactgatggccgagcccagcctgaccttgaagttcacagctatgtggaattcgtcacttacttacccaattctgctctttttttcaaggtcaatttcttcatcttcctgaaaattctcaagcttctcatttctaagctcaaagctcatcaaatgtgcttcagagattataaatacaggtgagtggcttaaggttggtccccagcagtccaaggttattgtaagtactctggctgttctgcccgctgtcttgggaaggacatttatctcctaaggccagggtatcagaaagagcagttctgggaaggtgctataggatcaagtgaggcttttgtcaatggtgaggaccttctatgacgatgaagcaaatggtgagtagtcaagggcattcacatcccccagcagaaaactgttaaaatgcccctaagagggcaggagtgatgtctcagacctgtaatcccaggactttgggaggctgggacaagaggattacttgaggccatgagtttgagaacagcctggacaacatggtgaaaccccgtttctaccaaaaatacaaaagttagccaggcgtggtgcatgcctgtagtcccaggctaaggtgaggggcttgcttgagcccagaaggtcgaggctgcagtgagccatgattgtgccactgcactccagcctgggtgaccctgtctcaaaaaaaaaaaaaaaaaagtttctaagaatgggtggttgtgggaaaaggacagtcttgtttgaagagaagtttggcagttgccttccttggggaaggatttgaagagaagagattatttgggtgtttttgagaccttgagaaatgagaccacaaacttttagggtctaaggaaagacatccttccacaggcatcctttaattgtgacttgttgtcgctgcatctcaccttcctctttctgagatgacagcagtcctcattcatagtcagtcagatcataggtatttattagatctgcattgttgtaaaagcaaatgaatgaatgaagagagataaagggtttcctccctcttttcctagttattctttactttctttcttttttttttttttttttttttgacagagtcttgctcttgtcgcccaggctggagtgcaatggcatgatctcagctcgctgcaacctccacctcccagattcaagccattctcctgcctcagcctcctgagtagctgggattacaggcacctgccaccacgtccggctaatttttgtatttttagtagagacagagtttcacc[138 bp omitted]tctggaacgggagtgttttaacccacagagtagctctaagagtaggaatttcagtccacacaggaaggcagaagaggtgggcacgagtgaagatggccctagccctgtttctctcccctttataaggcctcacccaggtgctgggaagggagtttttccttttatctgacaaatatttaatagatgcctacaatgtgcctggtactgtgcttggaataaaaggtggacatgaggccaggttcggtgactcacgcctgtaatcccagtactttgggaggccaaggtgggcatatcacctgaggtcaggagttcaagactagcctggccaacatggcaaaaccctgtctctactaaaaatacaaaaattagctgggtgtggtggtgtgtgcctgtaatcccagctactcaggaggctgaggcaggagaatcacttgaattcgggaggcggaggttgcagtaagccgagatcgtgccattgtactccggcctgggtgacaagagcaaaactccatctcaaaaacaaacaaacaaaaaacggtgtacacgatgtagaccctgcatttgaggagcatgcattctactttgctaaggactaggatgttggcatggagcaggaggtggaacggagggagctggccacgaccctagacttgcctactggccttaggcaagtgccttggcccctttggcctgctttctggtgtgtaaaaatgggagtgtcactgcagactcatctcctgcttattatgaggattcaaggagtctgtagatatggttataaatatgggtggccactctaccctccctctaggaggtctagaagggtaaacatacccggttcaataatgggcagacatactatagttgctagttggagctttggtccaaacattttgcaagaaacccgtagccctggggagccggcctggcctgggctccagggagccacgctgtctctcttggcgcctccagtcgaggctccaagtggccaagcagtctctctggctcccttcccaaaggcttagcctctctcaccactctttcagggtggagcttcaaagcctgctctagtccaccctgctgggtgcactcagggaggagagttctctcaataaacaggtgccaggaaaaccagggtgccccagaaagtggacagaggctagtgtttccaggagacagaaatggtgcagttgaccccaaagggactcagagctgacacactgctgctttgtgcccccaaagcctatcacgggccactggcaccttcgccatgcccaagacccacagcaacccctaaatagtttttcatcatagctcctcatcagcatccccggacagctggccagaagtgcagccttgtgagccctaccactgggtattctgactccataaatgcgggatagaacctcacagagcagccgtgtccaaccctttgaatggaaggacatttttgcttatccgttgtggtggatatcacaaaaactatgcatggactttttttttttttttttttttttagctcatcagctattgttagtgttagtttattttacatggggcccaggacaactcttcttcttccaacggggctcagggaagccaaaaggttggatacccctgctgcagagtctcccaggagattctgatacacagccagtgtggaggactgctgggccagatgttctattgaaagaacacatgctaatgaataagcattagttaatcaactctattgcactctgcagaaagaactagtaaacagaaaggtggccaacgaaaatggcagggaaaccacagagggaggacgttctcagtggaatattctggtcgggccattataaatgtcatgcagcctcaatgttctcttttccagagtcccctctagagttttcagacttttctgatcacacatctctgtcagtaaagaaattctgagcacatccctcctcatgtatatgcatggtatcatgagctaatatatgtattataagatagaccaaaaaatagaaaatttaagaggacagataaaaattaatatatatacaatgcctattatcctctattataatattttcttccaatatcaaatagattgcccggcatagccctggagggtgcgtacccaccaggagccattggtctaggaaagggtaaatcaagatactggggagaccctcatggctgagcgatgatccagggtgactgctttgtggggagaaagagcaaccctgcctgacatatgcagtctgtctggaaattccttttttcctctcccctgcccttgttcaaagaaaaagcttaagaagaagaacttggggctgggtgcagtggttcatgcctgcaatcctagcactttgggagcctaaggggaagggatcacatgaggctaggagttctagaccagcctgagccagagtgagaccctttttctttaataataataataataaaagaggtaccttggtgtgtgtctacccaaagtcctcctagggtgagatgcctcaccttggtgagtttgccaccacctgggtatagtacagggaacccatctatattcttgagtggctgagactttgggaggctgactgaccccagctgagctcacaatatatataaactagaacactgttcatttttaacgtctgtggaaggtggggatggggtagagcattcctttcttgtgcccacatgcctcccaaaatttcctaatccgcaacaccagaagatccaggaatccaaagaacgttactggtgatcacatcacaaagcagagtcttgctgttgaaggatgctgaggttagcctgaaaaatcactatctgcccacagcaccacctacctgttgggaaggaggctcattccccagatccagtgtgccctccacagactagggtgagataggcactgagaacgtcctccctctgtggtttccctgccattttcattggccaccattctgtttacttgttctttgtgtagagtgcaatagagttgattagctaatgcttattcattagcaaaaaggcagggacctatctctcaggacacacctaaaccaccttatttaactccctgcgctggtaaatcctacagcatctatgaactcacttgcccattgtgctcttagaaagcctcgctaattctctcactttcaagttctgagagagtgctctttactataaccccagcagggcattggcacccctcagctcctcagctcacagtgccctcttccatgtcggaaagttgttcctcttcctcatccccttccatgtttgttttcccttaaagacttctgatgggataagaaggaggaggtgacagggcccagcatattttatccaaactcttgtaggtacaggctgcctccaattcttgaagattttgagaacttttagaatgtaaccctgatctggcctccctccaggattatattttaggaaagtttaaattaaacacatttaggccctgccaaagaggcaagttgctaggagctagagaaccttctgtagtcttagcccttgtccctgggcttccaccgtcaagcaaaggaaataaaaaatggtccatctgtctggcttggagaaagagaactgagccaagtgtgaaggaggaactttggggctataaacagggtaagcaatgccctaggaatgcggacagagttcagcagaccgtcagctcagctggagttctctgttctttgtggttcccagctcagaggcagctctcttcccctagataaagggccttaactctccatgggatgcacctgggcagagctcttgattcatttataaaggagaagcatttcattttcatttttatttttttgaaatggagtttcactcttgttgcccatgctggaatgcaatggcacgatcttggctcagcacaacttccgtctcccaggttcaagtgattctcctgccccagcctctgaagtagttgggattacaggcatgagacaccatgcccggttaattttgtatttttagtagagacggagtttctccatgttggtcaggctggtctccaactcccaacctcgggtgattcgcccacctcggcctcccaaagtgctgggattataggtgtgagccactgcgcccggcccgacaagcatttcttaacatgctaaaccccagttctttctgaaaggactttctgataggcaatgtaggaaacaaaagcttttccttaaccctcttagggtccctggctgggtctaaaaattagacaaagacagattaacaggagaaaaagcatccaagtttatttcataagtcttatatgacgtaggagacttcataaggaaaggaagacccaaagaaatggtcaaacttgtgtatttttatgctaggtttaatgcacagtggacagtcatgggggaagtatgattgaacaaaggagatctaatggttataaactgggggaaatttggcaaagcctgtttgtacagattcttgtgtcattgtgtcttcagaaataaggacgttcctttcctccacctctcacatgagggtcttgtgatccgcttcaggagaaggtcagaaaatccttcctaggtttcatgacctgtttcaggggagaagggcgggaggttagagagaccttcctgcttctgtgattttctcaaattctttcagcttaaaatactcagtatgtcaaggtgccatattttggagtaccacgttctgaaccacatcagcaaccaaagactaaaaatgttacaaattcaaggaaaattcgtttaaaaaattgagttataagcaaccgaaaggcagggatggcttctttaaaaatagtaataactaaaatgtattgatcatttatcgtgtgtcagataccattttttctgagggtttaccccatgttatttgtttaatccttgtgacagccctgtcaggtagatgctattactattataatactccttttacagatgaggaaactaacagagagagaggttaaataatttgcccacagtcatagcactaataattggcaacactgagatttgaactcaggcccagatactcttcctgtgtcctgctgcctttgactacaactccttctttcccactatattcactcatgtgccataagcagatgctcaataaatatttgttggatagttaaatgattgcaataaatggaaccatttaaataaacaaaaggttatggatgaaaatgagcataaacacagtctgtaagagtaaactgctattgctatttatggattttcatctggacagggacacaaatagtacttcgtctaaggagaagttagaataaggtgaagggtagacaatcccttcatgtctccatccagaagggtgagtagcccaaaactttattaaaaaattgttattctttatagatcattctgtactaaacgaaatgtgggatcagggaacaggaaaaggacattagcgggaaatccacataaaccccgaactttagttcctagtaatataccgtgttggtttcttagttttgacaaacgggcatggtt[135 bp omitted]aaaaatacaaaaaattagctgggcacagtggcgggcgcctgtattcccaggtactcgggaagctgaggcaggagaatggcatgaacccggaaggcggaggttgcagtgagccgagatcccgccactgcactccagcctgggcgacagaacgagactccgtctcaaaaaaaaaaaaaaaaaaacgttagggaaaactgagtgaagagacatgggaactctctgtactgccttagctaattttctgtaaatctaaaattattccaaaattaaaagtttgttttaaaaaaccataacaccataacatggcatcagaataagctgacaagacacaggtctgcttgtaggcatataagtctgtatcttgaaaacccagcccacccagagcaagggtcacaaattcagactcttacaagggccaagcaagtaacacaattgagtagtacaagccgggtgggggctggatgtcacagcttccttctaaagggacagccattgcccagctgtaaccaacgattgccatgcaagaatttgagcccagtgttgccagatctcctcatttttcaaaagaagccagaaacctggacactttttctagaaatattattatttaaagatgactccaataacaaaaattgctccgtggcctaagcaaaagttgtctgcaggtcagttactatccatggtcaccactttgtaacctctgggccagagggctttaaaaacactcctggaaatacaaaacccttgaaatgttctctcattaggagcatattaatgttgcctagcgaaatgacttctgtaggggtgggtgttggagtgggagtcgatctgagctcagctcaagagaaccacacagccaaggcccatgattccatctgtctgctcatcagcctttcctgacagtcaaggctctggttcacacaatcacatggccaggtggagtccctccgtcctggtggctcctgcacccctcttcttggctttagatcctttgggggcacaaaggtgaggttgtttatttcattgataacattgcatctgaatggcccttgcagacataggattcatagtaagctcttgttctcgtacagagttaaaccttccttaagaaactcccccatgaactgcgaatgccaccctgtttttctacacctttaattccatgggatctgaggggaagttcctcctagtctggcccctttagaagaagtgacctaagctaaaaaaaaaatcattacaattacgctcctctttcccaatgtgggtaagacagtagctttgttcgtaccccgaatatgagtcatctctgctaatgtagttagttttaaattaagaagcagctcaacagtaaagggcagttatttccaaacctgtatacttctcaggatccatgaggagttccttaaaaagtccacatccagccaggtgcagtggtttgcacctgtaatcccaacacttcgggagactgaggcaggagtagtatatcacttgaggctaggagtttgagaccagcctgggcaacaacataagatcccctctctataaaataaaataaaataaaataaaataaaataaaataaataaaataaaataaaataaaataaaataaaataaaataaaataaaataaaataattatccaggcacagttgtgcacacctatagtcccagcttctctggagtccgaagcaggaggattgcttgagcccaggagttcaaggctgcagtgagctagaatcgtgctactgtactccagcatgggtgacagagggagatcctgtctcttaaaaaaaattaacttcctgggacccaacctccagaggtgtggattcagggagttgatactgaggcccaggaaactatatgtatatattttaagagctctgtaaggaattttaatagtcagccacgtttgggaaccaccagtatgcaacatttgggtcccagctgtgcactttacacgtgggtggcacaaggaatgtttgtcttttttgtgtagtctatatacaacagtgaacctccacgccgcactttttatgaggaggatcagtttttcatttcctgcagccctcactatcaccagggttaaggggcaacatgagggctgacagcgaagtccagaaaggagtctgcaggtcggaactgcaggtcagatgcccccacatccagcccgaggtttactacttagtgtctgtatgaccctgggcaactcattttctctcccttctcatggtaacactggaaatactgatgttgaaagtccggagtaaagaaagagatagatgaaactgctaaccacatgataggaaatttaacaaacctggtaggggtggagtgtcccagggtggcagtcacttgcatggaaatctatccatcaggcaaaactttaagagctacagacatatgacaatctatacaggggaatttatgcattcattcattcaattcatgttttctgagcattccccatgcgtcaagtgtaggaacacaacagtaaacaagaccacaatggccctgaagcgttaaatgttgtagtgaaggagaccatctgggaaacaactatcaatatggtaagagctgcaacaaagtcatggcatggaagagcaggaaatgttgcttgttccccatgtggccctcttgactgttatttggttgtcatttacagattggcaaaatcaacactggtcctcattcctttattgggcgttcatgagatcctcttctctttcatcactgatgatcaagttgaaggatttgcaaaacttatacgacttttcattcagttgacactgagctcctttcatgtaagtagaaatctgaaccaaaatgccttgactttggagaaaacaaaatgcatgtggccgaaacaggctcagaattaaggagcccgtggatgaaaatagaattgtagcatcagcagcctttatcagtaagggcccttggcattagaagggcatgcagacggggaagtattgcgttgatcctgccagcatgattcagtgactaagaagggggaaatggtctctttcctgggtggtaatagttggtgtgactcatgatcatattaactatgagtgtcaatgtgaagccttttattaagtgcctatttttgctgggttctctgcagagcattgtgcaaagtaaacattgtctgtgcttcaggtgacatgtacacagaatgcaacacaaattggatagggactaatgagttcagaccaggaggctattgaaccttgacagatgtgtgggagttgaaactaggaacaagaggctagctgtggttgttacctggaaatattttggtcatctattgcttaaattattatctatttcttagtgtcttaagatggcaatttttaaaattatttttcatgattctgggagttaggaatctaggtaggacctagtagggatggctaacctttgcttctgtgatgcctcctggggctggaactaccaagatgtcttcttcactcacatgactggtgcctaagttggatggctcaaatagctgaggctagtcttatttgggtcaaatttctgaggcctcatttctcagtgtccatgacattccttaggcgttccatgtgttttctccttgtggtctctccacaggatagggcagttcagggctcccaagag[138 bp omitted]gcctc[224 bp omitted]cttctgctgcattctgtcatttaaagcaagtcacagacccagcctagattgaaagagtagggcactgcacaaaggcatgaatgctgggaggggcagctcattagtgaaggccactaatgcaacagattaccactaacagcacagcagcgcaggtcttcatagagtagttatctgaaaatgaatcatctttaaatgttggtgtgggggcaggacttctgagatgataaagagaggatctacaaaagctctccccaaaaggcaatgataaaattggacaattgtcaatagcaaccattttgggaccatacacattaactaaaaaaaaaaaaaaaaagaaatgagaaggattcagtcaagaaaaattactgaaattcagtaataacagtgggagtctatgttacttttgtctgggactgcttttgttctctaatccctgctccaccagtgaggaaattctagtgaaaactagcagcttcactgaagagggaggctgacttgatttggatcaaagagcagaaaaactctcatccttgggcattgccagatacagtggccgtcttggtgacaaagaaacagggaaggacagtgttacagcctgaagttatcattctatctggggtgaaaaaacatgctgatgggctagccagaaattttacgggaagatttggggaatgagacagccacagtgggccttgacaagcccccacatatttctcaggttgactggaaggttgtgtacatgcataaggttgcatacacactcaagaaggaccagaaaggacattcacacatttctggctgaatgtgagtttctgcacacatacagaggaaacatgagggggtctggtggaaagtaaaagccagggaaggcttcaaactgaactttgaatgtgttccccaagtgacatatggatccattggcaaagggtatggaagtcttatgggcttgaggtgtttgaaaacaacttctgatcaatcattggctgattattaagctattggaaacagcatcagatgaccagatttaaaaataaaaaccaaaattttttaaatgagcagagacatcactggccatataccacagcagagacagattccacataactagtagtccagacaattttctaaacaaaccaccaccaccactccagggatggggactggggaatcagaatcctgagttgttataatatattatctaaaacttccagttttttccaaaaatatgagatctgcaaagaaacaaaaaagtgtgacccatactcaggacaaaaaaaaaaaaaaagcagtcattagaaactttctgggtgggataggggatgtctagatgttggacttatcagacaaagacttcaaagctattataaacatgttcagagatttaaagaaaaagttgttgaaataattaaaggaattcaattatctcaattcaatagagaacaattataaaataagaaccaaatggaaattctggagttgaacactacaataactgatatgaaaattttattaggaaagcttagatttaagattgcagaataaataacctgtgagcttgaagataggtcaatgagattacccagtctgtggaaaagaaagaaaaaagaatgaagaaaaataatagagcttcagagacctgtggaatgccatcaagcatactaacatacacataggagagtcccagaaggagagtaaagatagaaatggtagaataaatatttggataaataatggttgaaaattttccaaatttgaagaaaaatgttaatctacacatccaggaagcttgatgaactccaaaaagcataaaacaaagaaattcatgcctggaaacattacagtcaaacagttgaaagccaaaaatgaagagaaaatattgaaagcaacaagagaaaaattgttcattacatgtagggaccaatgatacaattaacagctgactactcatcagaacaatggaggccaggaggcagtggtataaaatattcagaatgctgaaagaaaacaattgtcaatcaagaattctaaatccagcaaaagtatgtttcaagataaaggtgaaataaagacattatcataaaaacaaagactgagagaaatcattattggcaaacacccctttcaagaaatatcaaaggatgtccttcatgctggaagaaaacgacaacagacagcaactcaaatccacatgaagaaataaaaaacagtggaaaaggtagatacacaggtaaatctgaaaggctatgtgtaggttttttttctcataactgattttaaaaatacaagattgtataaaataataactatacattgtatttttgggcttataacatataaagatctaatatatatgacaagaatatcacaggagaagaatgagtaaatagagatatataggagaacatttttatattttaccaggcttaagttagtgttaatatgaaatagattgtgttaagatgcatgttgtaatccctggaataaacactaagaaaataactttaaaaaatgtatttaaaatactagcaaaggaattaaaatggtacactggaaagtatctgtttaacatggaataatttcagcctcatgggattcacaaaatatccctatgaaggataaattattatacctattttaaagatgaaagaactgaggctcagaggactttcacatgctaacatgtatcagagatgaggtttttattcagaggttaagcccctgcctgtaaccactatgccatagtgcctctcaggtgccttgtgaagattagaaccaggagacaccaagttccctataccagtcttaaaggtcaagtgctgtctgatatattggagcaatataccagacagggtcaagtgctgagatttcgtacacagagcagagaaaatgtgtccgcccactgcatgctcaccaaaggccgaggagccagagcctgaagtgtggtatgagcagttggacaatatttttttccctcctgttggagttgaattctttgtggctttgaaccaagacagaggatccataagcaatttttttcccattatgaaaacatgtttatttcagtcttttagggaatttcaaaagataaggtttagtaatttggaatttttgtgttcctggccgtaatcttctttaaaaggtagtcctaaattagagggggaaaaaaaactctgcagctgttatgtagtaatatttggtggccttttttctccggaaggcatgggtcaggcaatgtgagcccttgatcacctgatctcactcacccaaggcccggtaaagacaagtaattcatgtggagctatgtgaggcagatttctgagaaagaatcctagactatcagactcttctgccttgggaggatgtgttggtcatctgattctgtgtaataaaccatgccaaaacttcatggcttaaaatagtaaccattttattattattattattattattattattattattattaccattatcattatcattttgagatggagttttgctcttgttgcccaggctggagtgcaatggtgttatctcggctcaccgcaacctccacctcccaggttcaagccattctcctgcctcagcctcccgagtagctgggattgcaagcatgagccaccacacacggcctcattttaatatttttaatgattcagtagactgggctgcttgggctcagggtagatagttcttttgatacatgtgattttcggctggggctgcaaacgtctgaaggcccaattggagtggcacatccaagatggttcattcacataactagacattgacgctagctgttggacaggacctcagctaagactatatagctcagggggcctcagttctcctccatgtggcctctccatgtatcttggatatctcacagcatggcggctggactctcaggaccttcctccatcttacttcctctaagatggaggaagtagaaacttccagccctcttaagtcataggcatagaactcccagaatgtcacttttacgacattgtatcagtaaaaaaaggagtcacaaagtcatcctagattcgaggggagagaaaaactaggtccactttttgatgcgaagagcagcctgagcccacagaaagtagaggaaccatcaaggccatctctggagactagctaccagcatggaagatttgttcctgaagccagctagagctctgctcatcaccctgtactgctgaggaacgtgaggaatcaaagtgactctgcagggtgttttgtaccaggactgagccagaaaacacacttagagggcttgtgtgtgggcagaggactcccaccttcggaatactcctgccgtgtttctctgcatcccaccaggcagaggcaagagcacaggtgggcagatgttgggggaactacacttggtggatcattttagagactccaccatgggaattggcaagaacaggcatcagccctaacagcttcctttccttgctgctttggagggtcctttactcttccaagagcctactgcttagagagttccaccagcctcctgctatcagtggagctttggagagactgccaaacagcggtgacatatgaagtaagagccatgtgttctgtgggacccactcccttcacacttgcttaatctagaatgagaaccagaccctaggatgttcctaaaactgtgaagcaagcacccgaggaagtgaaaaagacacatttgtcatgtggaatcctattttagccaacttgtttgtgagaatcctggcaccctaaaagccagctcttctgatatcatgtgcccagaggcaaatattacctgtcccgccaaccgcatagggcagctgtgaacctctgaccagattgcatgtgtgaaaatgattaagtgataacagtatgcccctgttatggaagctatagccatggaatatctaggtgcataagagaaggaaaattccacattcatgggcagaatccaagcatttggttgatgtcgtgattgccagtgtggagatcctggtctggctccagaagggacatgctgaacaaggcttacataaggaagagcagaaaagccttccccagtgccacatttcattatcatcaagagatataagaggagtcagcctgccactgggaccttcactctttagttggaaatgcatcctttccttgtgagttctggcattttctataaacatgcaagcattgggccctgcacacacatccagttccaatatatcagacacactgcccaaattccacagacccttacatcaattagggacagccaggacatgtaggtgatcacagtgactatctgacaaatcaggatatgtaggagcctgagaaagacaatggaaacaagcattaactggagcaccttagattccagcccattttgggctgagtattgtggcgatggtcatcctggaacatgggaaccacatgactgacagccctgccagaagctcagagagtagggagggtcaggggccaaaaggaaaggatgcaagtcaggcaaagaaaaaaaaaaaaggaccaggcacagtggctcatgcctgtaatccctgtactttgggagccaaggcaggcgggtcacctgaggtcaggagtttgagaccagcctgcccaacatggtgaaaccccgtctgtactaaaaatacaaaaaattagtcgggcgtggtggcgtccgcctgtaattccagctacttgggaggctgagacaggagaatgcttgaactcgggaggcggaggttgcagtgagccgaggttgagccactgcactctagcctggcgacaagagtgaaactccatctctaacaaacaaacaaataaacaaacattagccagtgcccactatgaccaagtagagatgcaacagtgaccttgcccaatatttgtataattgaatgaatgacacaaggtcttgggggtttaatcatcattgacccatgtgcacctgtgaacaatctaagcaaacacctaggctgatataggcggagcagggcgggcggggcgctggatgtcaaagtaagaacagatgccatggaaatccaagttaatgtaaccagtatgactaattctagttagtgtaagcaatgcagttgcacgcctcttctggagactccttacgacctgtgcagggctttggacgttgccagtaactctcagacacatcttctccggagtcagattttatgccatgtcctccttttgtttcaggggttcctggtggccttgcagtatggttttgccaatggagaggtatgatttccacgttgccatcctggtttcatgtgaggttgggactgcaaccctacccacctctggaggtttctgtggatgggatgatgctacgggagaatgtgcagtgaccagcatgtgtggggacaaatttgtattgtgagcttccggtacagagagcaggaggcagcttagacaaatggaaaaaaggtgtcgggatgggtataagggagttcagaagccagcactggctctgctggagatgcaaggagtattcaaatgtgacagaggaaacaagcttgaacctcagagtccaaaaatctgaattcacgccttggttcaccctcaggagttctgtgagttagctgggtcaccgcactttgtttagcctcactttcctcatcagtaacatgggagcaacaatcatccctgctttgtagtcttgctctgggtatgctgagcacatagcaaataaatgctcaacacctgggaactatgattacatttttttaaaaattatttttatttttttgagacagagtctcactctgttgcccaggctggaatgcagtggcatgataccagctcactgcaacctctgcctcccagattcaagcgattctcatgcctcagcctcctgagtagctgggattacaggtgcccaccaccacactcagctaatttttatatttttagtagagatggggtttcaccatgttggccaggctggtctcaaactcctgatctcaagtaatccacctgcttcagcctcccagagtgctgggattacaggcatgaaccatgaagcctggcctattattgcttttagttattcatattattgcatagcccaaccagctctctgcttccctgggaaaagatttgacagtgggaggggcagaggccagaacaggtgttttctcctgtctttaggagttggtagagtttccaaccccttttcaacctcctctcgccctactacaagtgtaaatatttatttctgtctcctcccattatgtacttccacttacatagaatgtacatagctcacattctatgtaagcttcttgacagcaaaaccatcttctgttttgctcactgctgcttcttctgtatcttcatgcagggggctcctcacctatcaagcaggtttcagctcacatgccaccccggcagagtcctttcctgaacaccctgtcttaagtttttgtttctttaccgtattgtcctgcttagtactctcacagtgtcatcaccaccagacatgtttatgtatctttgtttctccttgtctcccccagttaaaaggtaaatttcccaagggtggcacagagtagctactcaattaatatttgctaaatggacacatggctaaatgactccaagacagtaacctctcacttgtctcacccggcaggtgaaggctgagctgcggaaatactgggtccgcttcttgctagcccgccactcaggctgcagagcctgtgtcctggggaaggacttccggttcctaggaaaatgtcccaagaagctctcggaaggagatggcgctgagaagcttcggaagctgcagccctcacttaacagtgggcggctcctacatctagccatgcgaggtcttggggagctgggcgcccagccccaacaggaccatgcacgctggccccggggcagcagcctgtccgagtgcagtgagggggatgtcaccatggccaacaccatggaggagattctggaagagagtgagatctagggtggagttccaccaccctggctctgctcccagggactcttgagggggcccaggaagaggaagcaaagcaggacacacgttgctgggcacggaatcattctcgttccattcaccatgccactttgatatgaaagctatcacaaggttcttcaagctctgtatgaaagaggctgtgtgtcatgctcacagcctctgcctgctcttctcatcctaataacccccaccagtgtgttttccacaatgcccaccagaccctagggcctggctctaaattcaagccaatgaagtcccaccatgaagagaggtctcctgttatagagaagccagccaatatctcttcctttatcccttggggtgcatgctttccatctgaggttgggtttagggtgcgtgaaaacctcctaggaagcttttaaaatgcagaatcctagacttgtggctaagattctaagacagtgagtctgggaccatggccaggaattggagctgtttaataagcatcccaggtaattctgctgcaagcccacccttggagaacactgggcagggtgagagggagctagaagcgcccccatgtggccatggcaggatgctgcaagagacagtctgctctcccaggtcagctggggtgtgcctgccctccttggagagtatgtaactccacccaccagagtgccactcctctctgctcttcctctcctatcaagtcttgcctctctctctctttgcctcagttctctgtccctgcacagcaggagttctgcttgatcctccctttgaggattggccccagtgcctggggaccctctgaatgtcgtctttggtctgttcctctcctttctggctctatctacctttctgagtttggcttctaccagcctgatttacactaccattctcttggggcaaggaatgtccccaccatttttggtttgccattgatgcattgattgtcacacctgttgtcccaggaagttgacctataactctccatggccagagtccctgctgatcagaattcaatttgcccagtgggaataaatactgaaagcaggagggcccaggtaaagcaataggagtttggctggatctggacatgcccagggtggctctgagagatccaagactttgcatccaccagcctgtgggatctttcctgcctactgtgacccatggaggctgaggagggcccaggcagttggggtcaggctcaatgactgaaagtatagggcaagaggctgtaggaagatcaagggatggacatcctttggaaacagtgtgttaatgcacaggagtgtcactttcatggtatgtaaaatgcatgtgtacgtgggtggggtatgttgctatgggactaaataccaccttgtcttcgggggagtcagtttgatactcctcaagcagggctgccatatttagcaaacaaaaacaaggtactcaattaaatttgaatttcagacaaatagtcttcttgtataagtatatcccatgggcatatttaatctgagattggaattcaatcatgcatcttgtcttttactggcatctctgttttcaaggatactttgccacagggctgggactagggtgaaataatcaaggcactcatctctaaaaagctcaaagtaaatgatcaaaataaatcatattttaatgcaatattctaaaaaaacaaattaacaaactacagcccatgagccatttatagaaatgaaatttgattggagccaggggcaggataagggtgaggcaggagaggccagctcttgcaagtgcaggctctggtcctgactttcaaatgttgtctatgagggacttttaatgtgaatttttatttttagacaattgcattaaaatgttatttatattgactatggggacttttggggcccccttaaattttgcacttgaaatgggatccccacttgtgtcaccccatagtccagccctggttttaggatggggatggaggcaaaggcatcaggcaagtaatgaagcaaaggtttattttttggtgtccagattatccatagctcagtcatgaaaatctatgtctttctatttttctcctttctgcaaatgtccctgcctcggctcatcagccaattagctcctagaaagctggggtcatctcgtattcccagcaagtacccagcacagtgccggttcagagcaggtgctccacacacattcctggaatgagacagcacagaaatggctctcgggagcctcggatgctgctgggagtaagtgatccaggaccttaccgctaagaggagaaactttttttcaaagcatttataaatactccctccacccctcactccacaaatggggtgatcaacacttactgcttgctcttgttctgctaatgattaaaacaagtttatttaatttcatttgcattttgttgattcttttacatttgtctctcactggagctgaaggtctctcccacccatgaagaatgcgatgcactattcctggccagaagtgaggaaaagggctgtggcgtttagccagggacctgggtgctccaatatcttaaatttggtcttagggaccagaggagtgggcagaggggccgggaccagaagcagaggtcagaggtcaaaagaatggaaggagagtgtctccccttttatagaccaccccattggtcactcagcttgcctgttgctttgaagatctagtctagtggttctcaatcctcgcattacaatcccttgggaagctttttatttatttttatttatatttatttatttgagacccagtctcactctgtttcccaggctggagtgcagttgcatgatctcaactcactgcaacctccacctcccgggttcaagcaattctcatgcttt[137 bp omitted]ggcctcccagagtgctgggattacaagtgtgagccaccacgcccagccccctgggaagcttttttaaaagaccagtgacagggtctgaccccagaggttctgattgaaatggtcttactagacctgggcattgggatttttataagttcctgagtgatcttttttaaattgtggcaaaatatatataacataaaattaaccattgtagccatctttttttctttttgttttttgagacagagtcttgctctgtcaccaggctggagtgcagtgctgtgatctcggctcaccgcaacctccacctcccaggttcaggcaattcttctgcctctgcctcccgagtagctgggactacaggcgcctgccaccactcctggctaatttttgtatttttagtagagatggggtttcaccat[140 bp omitted]ttactgttgtgcagccgtcaccaccatccatctccaggactctttcatcttcctgaactgaaactctacatccattaaacaatagcctcccattctttcctccccaagcccctgacaacttctacttcctgtctctgtgaatttgcttattctggatacatcagctataagtggaactgtatagtatgtatccttttgtgatcagcttatttcactcccatagtgccctcaaggatcatccaccttgtagtgtgtgtcagaaattccttttttaaaatgctgaataatattccatgcataccacattttgtttatctgttcatccattgatggacacttggcttgtttccatgtttggctattgtgaataatgctgctattggtagggatgtataaacatctggtttctgttttaaaaatttgagtatacctacaagtggaactgctgaatcatatggtgattctatattttccccaacagctgcgccattttatattcccaccagcaatgcatgaggattccaaatgctccatggcctttgccaacatttattttctatttttttatgataaccattcctaatggctgtgaaatggtatctcattgtggttttgatttgcgtttccggaatgactaatgatgtcaagcatctttttatgtgcctgctgattagtcctttgtgagtcttctttagaaaaatatctattcaattcttggcccatttttcaattggattgtttgttttttgttgttgagttgcaggaattctttatgcattctgaatatggataccttatctattatttgcaaatattttctctcattctgtagattgtctttttgcctcttgatagtgcccttttatgtagaaaagttttaaattttgttgaagtccaatgtgtctatttgtttttcttttgctgcccgtgctttggcatcaacgccacctgtgtgactttaatatgggaccaaggttgagaacattggaactgaggcagaggggaaggaggtgaaccctcctctggaaactgacaataccttgccgaagtccaaataaactgagtctttctcccatgtagcatttagagctcaaattcttccacaagcacagactcaactgattctcacaactcttaagtgacaggcaatgtaggtgtggctggcccagttttattttttaaggagtggtcatccagctggagcctaagagcctgagacacagacatttttgggcttgtctgatgagtttatataaccattaaggggcagaaatgggagtgaagtggacagcagtacggcggctgaccccacttggctccatggtcagagtctgagcctggtgagagaagagaagcttcagacaaaagctaggagagctgtttccaggaggcaatgacaaaagctgtttccgtgacacatgctacttcccatggggctgttctgatagactctaacctagaaggctcctcagcagatcagcacacagcttgggtacattaggagcactgtggcctcgcctgtgattaggaacgtagtacttgagggcagcaatggcacctggcactaagggatctatgggtgaatctgtgtgggacacctcctggagatgctaaaaatgcccaagagacactgcacaaggggctgggatcttatgtgggcaggtggcaacagaagctcaggcagtttggattattgctcttaatgagacccatttctgcccttgaatttacatgtacttgaggagtcagggatctagagacaggaaatgacttccccaaggtctctatagtagacatctatttttagaatctgcccttcttatagtaccccaattttcctcttggaaaaaccactcatctcctactgtcagtccacggaacttgagttgtcctgactctatcctcagttcaaggatgggcataaaaatctgctggccaagcagagcagtacatccttctggcatcagatattgagtcaggcatgggcatataactaaccagagacagtgagatgcaatcctgacactttggctgggactcttaagagaaagcattttctcttttctgctgaaattggaaccatgaagaaggcagcctggatctgctggtgaccgtcctgccagcatgggaagaacctgtctgagaatggtggtgacagcagaaaccagaaccaggagagggagaaatgaactctgggacattgttggagcccctggattaagccatacctgaagctagccctactcctagaatttcagctataagagccaagcaatttctatttgtgccacaataatttgtgccaggtcatctaccttttgcatctggaagagtcttgatgacatagctcatcactatctccacctcctcttccctgtggccaagttgaacttcatgctttattttccacaaagtgtcatacagctgtagagaatctcagcccaagtggtccttccaccctaagctaaaaaaagaggcactaattaggttttcactctttggctctcccattgaaccacaaaccagcaaggacctaattatgcagtgtctgtccttttagactcaagtgacaatgatagactgacctcagagagaagtgaaaagcccccagcctcatcctcgaagcaaccagattcattcatggagtgtggtggaaagagcattgagccctttggttatattcctagaacactctggactggacccacagagtcttttatctcccactgaactggcttctatatagcccactatgtctacatgggagaatgccttgggtagatgattctagtaataatccttctcctcccagaacctctggactcatgccttgtagcctccttcccctttccatctctgacattgtgcaatcctagagttctctatcctgctgtgtccaggtcaaaactattggagaaatctggtgtaatcaaagggactccagtttaagtaccaactcctactcacacttcctgccctcagtatcctcatctgtattgtgcagataataacatctccatcaatgaaataatgatggcagagtctagcatggtgcacggttcataagtgtttattctcacgtttgctctccacacagaggagtgctctttggcagtggtgattgtgtcatctctgtggctaaagtggggtctggaggcatcaccacaataccagcaactagagactcctcagcctcaagaggttgcagacaggtcagtcaagaatccagggtatccatgcatttttctgacctcatcttggaacttgaggctggagaataaatgggccttcaaagcaacaaatccagggatcttggagaatgcactgatggagttcctgggtatcccaggccctggagctttgaggaggcagttgggggccggtgggtagcccttgcctgacctctgctcatcagctggctgcccttgggcaagctgcttcctgtcattgggactccttttccttgtctctaaaacaaggggctttagggccatctatggctctgccttcacctcatactatattgaagctgaattcatcattgttccctgaaaccccaaagactctctgtatttctcatctccatagatggcattgctattcacccactgcccaagctacaggcctggctgccattcctgccctctctcctcctgccccctcagccagccaggtggatgctacctcctaaatgtgtcctcactggatctggtcctctccatcccattgcctttcccctggcccaggccatctgagtggctgcaaaagcttattcatcgggctccctgactccagggagcccccagttgctcctctctgacttattttagcctgctggggacttctcttacaaacataaacccctcctacttccaactccacagtggcaccgctgtccccatggtgagcccccaagtgcttaccacaggctgcagggagggctttgcgtggtccagcccccgcctaccttttagattcagctcacactttgctctccctcctccttctaccctccagccaccccgaccttctcctggaactcgagatggtcattcatgcctcagcggctctgtgttggccgccttctgtttgagacttccccaccccgaccccgtcccccgcctcgtgtgcagtggttctgaatttaaatctcccttcgtcagggatgtggtccctgatcccccctgacaagtcagccccttccactgtgtcctcccctggtgctctgcacgtttccatggtaacctgggccactggtcatggctccttccaggttcattgtcccctctggaccatgagctccatgacagcaggaccgcattagactcattccgcaccaaagcagcccagcctagggctgccatcgcaacacagccttgtctttgaggtgtgactgatagaaatcatttccttttccagttgaaggatgaccagcagccacgtgcccagctcagcttgcgtttattggaaactgcttacccagcactccacaaaggagcttacagcggggtgacacttaggactcctatggcctaatcctgggattagcacagggccatgggctggtggacagagggaggggtgggaccgggcatgatgggagggaatgctgaagacccaggaagaaggaaccagtgggtcactacagatgcttcagtttggcagggagctgtgctgtgggcttgtgtgcaggcctttctcttggccctggggtggatgtgtgtgtgtgtgtgtgcgcgcgcgtgtgtgtgcatgtgtgtgtgtgtgcacaggcgctcacgggtgtcatgtgagtggtaggtggagggaggacagctgaacagttggcatcaggcgttcttcatcttttccttcactttttgaggctcaaactggatcagtcgcagaatttccttattggccagtgtcccctcaatgaattctttctctgtaagtttatctgtgcattgggaaaaaatatatacgtacataaaacagtcaggattgatagccaagtgagctgcgatgaggctgacatctagccagtatccccagtgtgaatgtatctattataagaatattgaatactcagtggccctgagtattcaatattcccccaccccagtccagatacccacctcctttcccatgacccttggagctccctgcagaccagcaaagagcggtgaatgactggcactgggggggcccccaagatgccagtcttgtgctatgtgtctcttccgattggccggtgcccctgccttgctggttattaaatacttcaataattaataactattaattgttattctattttctatagtagctcaagtttcaaggatcaagttcaggaggagcttctgggggtctgagcatagcaaaacaatctggatgtcaggcccagagtctcagctgagaagcagggaacaacatccctccagaaataggagtgagaagtgaagggcccaatgagatcatgccagggggagtgtggcttgcagagaggtctctttggcacctgcagcacacaggcagccccatgattcctggctgacaactccgccatgatcccttcctatgcatccatccctgcgtcccccagtctcatctgcctccttatttgggatcaggactgagagacagccttgttgcgcccacacctggttttccggtgtttttaatcaggtggctaactgtattcagatcagtccagttaaatgcatggtcctgagcccagatgccactgtgcttggagccaaggccaccacagggagcggaggcggggtgtacaatagaagagagtgagatgaagtccctccctgggaaactgttgacctggcggggaaggcagtcacacgcagaaatacctctagcatgagacagatgctcctttctgttgtatgttcacagtgcctagcacagagtcggtgctcaacaaagctttgctgaactgaatgtgatttctgacttatgctctgggccttttggatacctttaatcccttctgggttaggatccaggatggcttcctccgcaagtctgggtggtaaaatttgggttttaacatcccagccaccccacagagagctcacagagagcttgaaactcccaccatcaaagcctgactctgccctgaggcattgtctccagatgggccgcgtggaaacacgtacaacacatcacgaacaggagtaacacgtcgacctcggggcttctgacgtcatcccctcccgggatgttcaccagggaggttttcagatgagcaaaaagcagaacacagggctcgacacatgaacggacccagagggaggtcgcgaagccagttaaggagccagtggggcaaagtgccaaaagaaggcatcttggtagccagtgtctgtgcaaggaggagagagtgctcaaaggtgaggggccaatccgggccgatgagggaaaggtgggtaaagtaccaaggcgcgaatttaaggaggcgctcactttcaggtcctgtgagtgcattgttgacccctgagaacgagcgcctccttaaattctgtgtcctatgttcctcctaccccaatgaccttcatgcttctcttatttcatcatttgttggcagattaggaggagcagggtcatctctctctgcccttatttagcatcctgctcagctttttcttcttgaaccttggcagaagactgcctccagaggtcaccaaaggggttaatacaggacccttggatgtgtttgggccatgctgtgttttatcagttgagacacactggatttttaaagtcttcatggctggcttctcttaaaaaaaaatcagatgatgtctcaaccacgggttccatagccccacatggaatatgctggaagccatcagaccagaggtgcaccctctgctgtttgccaatccccactgcttgtagatgactgtccacataactcgttttcatcattcctgcccctccagccatatgtgtttgcagccccagcctaataccagctcctttaccgcatccttgtgctggccgtaagcatcacagacacacagccccagcagccgagtgctggagtccatcactgcctacagtgcaggatcacacttcctgggggctgcttccagccactgactgacagggcaggggcaccaagactgacaggggcactgaggacaccccatcgactctgtcaacacttcctcagactgcactgcagtctcgggcattacttacctaatcttcctttctttcctaaccttcctttctttcctaaccttcctttctttccctctctccctgccaggggtcagatctgcttggcagtctgatagctttcccagcctcctctcgatcccagcctgttttccttcttcagcctttcctcccataaatctcttgcaatctcatttaaatctaatcctatcttggtggtgtttctcagaggacccaaaccaacttcccaaagtaaaaccatagaaatacagatcccactgacttgggactcgatattaattcaaagctagggtgagctgaagtttgctcttgttctaattgcacagaaaacagttttggctcctgctcacccttaaggccattcccctgtccaacccttcaaacagctctgaaaatgcacaatggaatgaggtgtcccccatcctgcctggacactgtgactcagaagaataaatcttgttgggatttccaggaaacagcccatggttgaaaaatcaaaggcaatgaaggaaaaggaattcaccatcatcattctttccaaagtacttccagatcttctcggctcgcttttccggcgtgttttcatcgtctggaaggagcttcacgtcctcgggagtgatcattttgaaaatagcctgtaccaaacagaaagaaagaactcgttaggaggaactttaaggggctggcaaccctggaaaatccacatcttacactgtacacaaaaatctactcaaaatggattaaagacttaaacataagacctcagaccgtcaaactgctggaggaaaacgtaggggaaaagcttcttggcactggtcttgacgataattttttggatatgacaccaaaagcaaaggcaacataaaccagaataaacaagcaggatagcatcacactaaagagcttctccatgtcagaggaaacaatgaacaaaatcaaaatgtaacttatggaatgggagaaaacattcgcaaaccatttgcgttctgcctccccggagacacctgtgagcaggtcaggcaggggcaataatggctgtgaaattatcctggagggaaggtcgacagctttgagaagtttcccttcagccccctggtgctggataaaggagtaaagaggccaaagccacagcccagggcagcagcgtcgctggcagcactcaaagccctgagctggacgccagtgtaggtggctcctacactcctatccatctgtgcagggccttgggcaccatgtgcaggtgtgccagctagaagctggcagtgagtgcctgcccaccccacttccaacacggagggacagacctccagagcctcaggaaagactgcaaaaataatcaaatcctcaccctgggcccaggaaggttatatggttttcccacagcaacactgctagttggagtcagagctgggactagaacccttcacttttaactccctcagtcagtgctctgcccatgaacttgtaatctggtgaatagcagagccttctgccaccttgcacagccccagccattgatggagtctccctccctccctttcctttcttctttcttcctttctctcctcctttccttctcctccctcccttccttctctccttccccttgcttccccctctttccttcctgactcctaccttccctctctccctccctcatttccccctcctccctttcctcctccttttattcaatgagtatcaatttgtaggcttctgctgggccctgcattgtttatgccactctgaagacttagtccctgtcccaggccacccagagaccccacagccaatccgagggagctttctctgcaggctgtgccaagataacaatgagagagacacatgcctgccagaatgggaggcccgagctgagcattgaggataagcccatggaccacaagctgcatgctctgctgttttatttatgatttctcctaataactgtggaagatttttgtgcatttgtcatcatgcaaatgaaagcatgattgccaatgcacacaaagttattaacatctaaacaatagtctctactaacaggaatggaattagaagaataaggtaagtggcaggggcagggggactgaaaaagaataaattaaaaaaaaatcaaatgaaggaaattagaactggtataataggaaagaaatggaaacaacctaatgtccaaaaacataggaatgttcaataatttccacatttccataagcc[142 bp omitted]accccgtctctactaaaatacaaaaattagctgggcaggtgcctgtaatcccagctactcgtgaggctgaggcaggagaattgctcaaacccaggagggggaggttgcagtgagctgagatcacgccactgcactccagcctgggcgacaagagcaaaactctgtctgaagaaaaaaaaaaagtgttttggaagaatatgtaatgatatggaaagcactcatgataaaagagtaactgaaaaatgtatgataaaaaatcgtatgtgaatatgtcatagctttaacattatttaaaattatataggtaaaagactgaaaaggtatatactgatatactaagaaaagttttccctggatgttggaattagaggcaattgttagtctcttttgcctaggtttctaaatttcatgagttacttttatatcagataaaccattttcaagacacctacgaggttagtggaaaagtaattatggtttttgccattactttcacaacaaaggatctgacaggaggacagtatggacaggggagaaggcgtgttgggaaccatatggaagcctgtgcgcctcacagggaaactgtcaggagccggggagccacgccgcgcgtgggaagcgggggctcatgcgtggtgccatgatccgccccgcgctggggagaacatgaggactagaactcagagttcatgcccccaactttgacctctttctactttatattagaagcatattgtgtgtttagaatgaacagtgattcaacttgaatgtgtactgctgaaaatttcaaaggacattttaataaaggaaggaagaaacaaaggatggagagaaagaaaaaatgtaaatatagtcacgtgtcgctcagagacaggaatacattccgagaaacacatcttaaggcaacttctatgtgggaacatcatagagcatccttgcacgaacacagatggtagagccgactacatccctgagctccatggtccagccttttgctcctaggctacaaacctgtgcagcacgtgactgtcctgaatgttgcaggcagttgtcacacgatggtaagtatttgtgcatctaaacatagctaaacatagaaatcatgcagtaaaaatacagtataaagataaaaaatgggccgggcacagtggctcatgcctgtaaatcccagcactttgggaggctg[134 bp omitted]gagacaggagaattgcttgaactcgggaggcagaggttgcagtgagccaagatcgcactattgcactccagctctgggctacagagtgagactccatctcaaaaaaataaaaaataaaaaaccaagatacaaaatggtagacctgtctagggcactcaccatgagtggagcttgcaggactgggagttgctctgggtgagtcagtgagtgagtagtgagtgaatgtgaagaactaggacattaccgtacacaactacagactttacggatacacttaggctacactaaatgcatttgaaaaataaagtaactgtgctatgacgtcactaggcagtaggaatttttcagctccattacaatcttatgggaccacagtggtctatatcgtccgttgttgacccaaacatcgtgaagccaagcataacatggctgtattaggaaacactcagattctgctccgggaagacaacgaagctgtgggcaagtgcccacccctctatcaatatcagcatctcggagcaccacgctctcagagccagtggcccgcatcccccgctccacccacagatccactccctctgcagcagctgcagcaggggacccccagcccggagcgaccccggcaccgcccagccagaaggggagaggggagactgaccatgacgatctccagcacttcattcttgctgatggtcccgttaccgtccacgtcgtagagggagaaggcccactccagcttctggttggtcttgcccgcggtggtcatgtgcagggcgatgacgtactccttgaagtccagggtgccgtcgaggttggaatcgaagctgcggaacacatgctgggcgtaggccttggggtcggtgtcggggaagaacttggcgtagatgctctggaactgctgctgggtgatgcggccggtgggacagtccttcaggaaggactggtaccaggagcacagctcctcctccgagaacttggtgttcagctgcagctcctccaggatctccttggacagggccccacttttgctgttccccatgagtgaggaagagtgggcagcggctggggagtcgctgggtgggtgggacgtgcgtggtcccctggccgcaggctgggctcaaggctggtgtgagctgaagaccgagatgctggtggcttaggaggatttgcgaccagttcttcgcaatccttgaagggaggaggggcccaggagctttgtggagggcgggagcggtgggggggggtgctcccagaaccctagtgagattaaaataaagagcccagggcaggcaggcaattcatctcggcctcccgggacgatactagaacaggacaggaggttggaaccctcagagctggggcctccggcacccccagccccagccctctaacagcagccatgttccctgtttctcttcctcactaactctgagcatctcggggcggggctggcatctcatatcaagccctagaatgcaatggttaggagcacagactctggggccagcatgggttcaagtcccagcttggctacttaactagctgtgtggccccaggcttgtttcttcacctctttccacctgggacactcttctaaaccttcactgcagtcatgtctctgcttaaatgtcacctgctcagccaggcctatactgaccctctatctataatagcacaacccccaccatcatcggcacgctgcatgtcccctcaccggaatgaaagctccgtgaaggatgggattttgtctgtgttgttcccggatgcatttccattgccagaacctgataggcttgggcccccagcaagtctttcttgaataaatgggcatcatagcatctaccacactgtcattgtgaggctgatgtgagtcaatatgtctgacacacttagaaactggcacatggctaatgctaaacactcgttttgttattgtccatcagtcacagggagtgaaggtgaactgcctgaagggaccagcagggggcagccaggcctgtgtcacctcgggaaggggctgccagagaacgtggtcacatgggatggtgagatttttgggtttttttaaattattcaagagaaatccaaaaatcagaatttttcttgcaatttccacacttttcaactttggcaattaattcaaaattttaatggtggctcacgtctgtaatcccagcactttgggagactgagtggggagattacaaggttaggagttcgagaccagcctggccaacatggtgaaaccctgtctctactaaaaatacaaaaaattagccgggcatggtggcaggtgactgtaatcccagctacttgggaggctgaggctggagaatcgcttgaacccgggaggcagaggttgcagtgagccgagattgcaccattgcactccagcctgggtgacaagtgtgagactccatctcaaaaaaacaaaacaaaaacaaaaacaaaaacaaaacaaaacatggtgtgggccaaacacaatctatctgtgggtccatggcaggctgcagggtgtccgtctgcagtggacttggagtgagcaggcaagaaaacgtgtttgctgagtgaatggataaataactgagtggtcagagacggagctgtgcaaaggcaggcttcgcgtctgtgcagctcagcggggagtatcaagcacgaggaagcaacctagtgaggacgctgcacacctggattcttgtcacccagaaggaagggagggtgggcgtgcactttccttagcggagcgcagtgctcgaggggacacactcagaaccccagccttgccaccgtggatggagagttgtctctttttgccctggggtgagaatgatgaagaataaaccccacggtctccaggcaggtaaactggtttttttttagacggagtctccctctgtcacttaggctgggcacgatcttggctcactgcaacctccgcctcctggtttcaagcaattctcctgtctcagtcccctgagaagctgggactacaggtgtctgccaccacgcccagctaatttttttttggtatttttagtagagtcgaggtttcaccatattggtcaggctggtctcgtaaactcctgacctcaggtgatccgcccgccttgcatctcaaagtgtaaagtggggattttagcctacttactaacaggctagtggcagcagaaggtaggtccctgctgctgggagaaagccacctgccaggcccacctcatgtcactctggaaggaccgagaggttcaggcaccaaggggcagactcatccctcccagccgctctgcccagtacagtttcagagatttctcaggaaacctgcatattggggtgtgtgtgtgaactttctaatttttttccatcactttgtgagtttttttttttttgtttgtttgttttttttgtttttttttttttaagacagagcctcattctgcgcccaggctggagtgcaatggcacgatctcggctcactgcaacctctgcctcccaggttcaagcgattttcctgcctcagcctcccaagtagctgggattacaggcgctcaccaccatgcccagctaatttttgtgtttttagcagagatgggatttcaccttgttggtcaggccggtctcgatcccctgacctcatgatctgcctgctttggcctccccaagtgctgggattacaggcatgagccactgcgcccagtgagaatattacttctgaataggagtccttcctctcctaggctttcaccatcctgtagcgtgcatttattctcaagagcagttagaaacaggacagtcactagccttgaaaacaaacgggagcccaagccacaccctggaatcgcattcattccagagcttccttgcagccctggggatggagggagagtgaggtcagaggcctcggccccttgctctgagccactagtagggggcgactggaagtgcctcctggatcgcacccctgtccacatcaagcctgcagcagatgaggcgaagccagtgttacaagtgagaagtggggcctcctaaaggcatgtcaccagcctggggtcacatggttgctaaatggcaatgccagaaggaaggaaagtccaggtctgccagcctgtccatttaggcttcctttgtctacgtcacaggaggcctgagcctagaggacaagtaggtgaggaggtggggttaccatgtcaatgaaagaggccctgggcgaggcagaaggcagccagagccctccagtctttgctgtcctctccaggcacaaggaggaaggagctggacccaggtcggaagcagcctggtacagtccacattctccaggttgctgtgcccaggaggggccccaggggaccgcaggcagctgtgttgatgctgagagtgaggggtcatgacctggaggtttgtttgaaaacctgcataaacatcttctatcagagggagagcttatgctccttagccaaacaagttgttggagatgatgtattgtgagtcgatttgttaagtctgagctggggccataaactctcccaaaacccaaagactgctctagaggagaaggcttcatctccaggcagaggatcccagttttggtctcgctctcctcgctggactgaaagatgcttcccagaagctggccctgtcccctcaagcaggagctccatcttggccattagctgggacccagacgccaccccttccccattgctcgaccttgcctgctatgagctgaaggccaagacgaccctcctgccctctggcctggagccagcacctgcagagaagtccgcattgagagggaaaagggggtatggagaaggtggcgggggagacagagaatggggaaggaccctcctcccacagctgtccccattgcagaaaatgacaatccatccttttgatgacttggattgaggtccttggcatcattctcagtgtttctctttcggtcacaacccactccaatctatcaagaaatcatcttgactctaccttcaaggtacatccagaaccagaccgttcttcccgcctcccttgcacctgccttgtgcaggcagcatcaccgctgcctcctaacagctcttcctgcttctgctcttgtccccttacagccccgcagtgagccccatggccatgaaatcaggtcatgcactatggctgcccacttctcccagtccaagccaaaagcctgcagcaggcagcactggccctcatcccaccatttctcgcaagtggcctctggcacctccaagaacggatgaaagggggcggatgccttttgtctctctgctaagtcatcagaggtaaaatcaccaccaatcccaagaacctgggggaaacgctgagacgggtcgttcaaagaatgtgacagccctccaggaaagagggttgcccagcgtcctcatcttctcttccctcctcactccctccactccagccaggctggcctcagacacgcgagcatctcttccgcttggaacactctcctctggtgaccttccagggtccctcccaggtctccttgtctttgatcaaataccaccttctcaatgaggccactcaaatgaccctattgaatcctgcaacgtaccctgtcctggttttcttttccacaacacttaacaccatccacacccacatcacagaacatagtaggtctactgtttttgtctgctagaatgtaagctacctgagagcagggctctgtttctcacactgatgtgttcccagaacctagagcagtgtctggcatataccagatgctcagtaattattgaatgaatagatggatgggaccgggcgtagtgactcatgcctgtaatcccaacactttgggaggccgaagaggacggatcacctaaggtcagaagttcgagaccagcctggccaacgtggcaaaaccctgtctctactaaaaatacaaaaattagccagttgaggtggggcgtgcctgtagtcccagctactcgggaggctgacaca[138 bp omitted]ggatgagaaaagaaacagccaggagctccagagatgagagggaggcaaagggctggaacccacagagacaggaagtcaccagggggaggggcctgaggccaggagcatagcatccatttgggtgccagtgtccagatgccctttgtctcccgctaagtcatcggaggtgaaatcaccaccaatctcgagagcctaggagggatgccaagacaggtcacatgaagaatgtggcagccctccaggaaagagggtcgcctagggggacctagtgtctctggacagtttattttacatgggatgaatctaggcatctcgaggatacacacagagcagaagaaaaaaaaaacgagatgggatttaacttcctgaaaactctttataataatgcaggacaactgtatatagcaaacgccttcaaaatttaaactctttaaacatttaattcttcagcattaatacacacaaatgcggtaacaggggtcaggggggtggtgcgggggcaggtgggttacagcctccactgggatcagggtttcaacagtgttacttataaattatattacatcaattttatttactgatctaggcagccagagggtggaaggatatacaatgtggaggaaacacattcataccggggtgaggagtgctggcgggagacacggctctttaacatgaaaaatgtataaagtatttagcaaaagttacagaaaacagatcaaacaagcaagtttattttgttagaaaattccactttcatagggtttgccgatgtgctcgtgtctgtgaaggggttgcttccggtcatctccttcctaacggaagggaagggatgctaagttggggcccctgtcactaaggatggctggcgtccctttgaatgtctgtccctgggtccacacagctgcctggaacccacgactcccgagagcccgtctgctgcaggtgatgctggaagggaagcgcccccacttgacagatgagtgcacggaggtcccgacaggggatgtgacttaacttcaggttatgggacaaaggaggccgcagagcagggccagtcctgtgctctccccctgcatagcaggctttccctctaggtctcccagtcaccccaccccgagagagcacccacgtgccctgaccttacattccactgcaatcccactaaagtttccctcaaacaccaaggaacagtcctgaacaccacacgcaatctccaaaggccatcgccccaacctcaccccacccccagagacacctcccaggaagccctcctgacagccatgccccagcatttagaacgtggggagaagcgaattggtttttgccctctgtctgattctcgctctaacctgctgcaatgggaattgcttcttcacctccaggaaagcctcaacaaaaatactcctgagggggagacaagagtcctccccggcaaatttcaacccagcagagtcctggcagcctcttcggctccctaccttgaggccccgggggctcaggcttcctggccctaatcttcacctggcctggatccagaaatgtctctggttcgcatagagaggtacccaactggtctcgggactcacctttcactgagcagggggcatgaacaagacacagcttagtggagtgtttacctcaggggtcacactcagcctggtctggccttaactgggtgtggtcctgtccctgccaccatgtaccaccatccagtggggtgcaggtacaggccaggctgtgtgatcaccagctaggcaaggctccagctgcgacaaggactccatcttcacgcctgtcctggctcctggggagtagactccagaacatactatcaaagatcgacgaatgagatccaaacggtcattacttgcactgtctttggggggtcctaggagaaactacctcattcttaacagctcataaaactcttaattttagctccatttgaatctaaatggaaaagtaccacggcatctctctcaccaggacttgaggcaattctatgcacgattgtgcagatgagagccagacacagcatgaacacgtgtacagggtacatcattggaaatgagaaagggaggaggtacatgcagttgccggtggcctgagacactcatctagaacaaacaccctcagcttgcagatgaagcaacagatccaggaaagcatcatgatgagccccagggccagccccagccttcttgtccatgctgcttctgctcgcctttcaaagcctccaacgcccaatacatagccaaggaccgtgtgacactgaagcctgggtcccagaagggagcagatctgctggctgagatgcaagcttcaggttgcagcagacgtgagcagcaattgagcacccatccgtcccttcccctcccatccctggattctttctgcactaccaaaaacccaccacgcgccaaaaggcgagtgtgagccctaagaacagcttgtgggcacagctggcatttggaggaggagcctggggaactgaaggaagcagcaagctggaagtggtcgtgcaaacaagttgaagaccctgggccaagaacttccagggcgaaaggctcagtgtaaaaataaagaagcagagtagtacgcccatgcaatgaaatacttcccggcaaggagaaggaacaaaccacacgcacacatcatgaatgactcaaaagcattaagctgagggaaagatgccagactcaaaaggcgacatcagtgtgactccatttatatgacattctagaaaaggcaaaattataggatcagataatcaatcagggttgccagggaaagagggcaggagaagggaattttttggagggttaaaaacaggttgatcttggtgatggtcacaagacactaaatttgtcaaaattcacagagctgtatatttccaaagggtgaattttactggatgtcaatcatacctcaataaacctgggaaaaggtggtggcgatgggccttgtagggatggcaaggattatggggataagacgatgtccaggctacgtgggggggcagctgatctgtaccccacttaacattagaagtgctctctccgacctacacaaggaatgcatcttgagccttctgtttaaacactccttgtcaagactacctgcagctggaagtaaaatcacctaaacaagccaaggtcgctgatgtccttcgaatgttatggcttgtatttccaaaagggactttggctcagcccagatttttctgcatccatccactcatctagtaattgattggttttcacaaagggtagggaaagaaacccctggttggtgaattcgttggtacactgtttcggtgtgcccagctgtttatcaatcctgactagcagagcactgcctcccaccgcagaaattctccttggccaacagggtgctgagtggaggtagaaaggaggcccagggtggtcccactgacagaatctcagggccgccatccccacggtccaaggggcctatgtgttgccactgactgaaagcactagaaagaatagagggtaacaagtggctcttcctggaggttgtcacagcaaccaacttggaacaccatttggcttaaggaattttttttttctttttaaatcaggctttcacaaacagatcttgtgcatcagtctcctgggtggaggcaggtagaaggggctgacttgttctcagaaatggaagggacattctcaagaatagcccagacccgcccactttgaataaacccagctaagtcctcacctaagcaccaagacataaaacaaaacaacaacccggatagcgtgcttgcctctccaaagtgcagtcttttattttctcagttgcatcctaaccttgatttcaaccagaaacgggcccctgttcatacggataggggttctggactgttgactctagccctggtcttaattcactggcaatttcatagcctcactggttacccttgagcttcactttcctatttgcaaagagttatttataatttttttgagatggagtcttgctctgtcacccaagctggagtgcagtggcccgatcttggttcactgcaatctccgcctcccaggttcaagcgattctactgcctcagcctgccgaatagttgggactacaggtgtgcaccac[137 bp omitted]gcccgacccttatttgtaaagagttatttaaagcaaacagagaaatttctgaaattcgaattggatatgggccgtgagggtctggtgaccaggtgattaaaatcttgttgctgtctaccttccatccaacaggtaaatgcctcacgacggtggtttatattataataaagaatcccagagggttaagtgtggagagggtacaatgttcttattatactcttctcagtcgacatggagaatagaggagagcagaggaatgcccatcttacatacaactagagcgccgcttctcagcatgcctggcttgtcttgagcattcgctgaatgaatgcagattaatcagaacaacagacttacctctgaaaacttaaattctgtagagtgcctatgtatcaatgccaaggttgctgaccggtaagacccctgaaaacgagcgatcacgggcttccctgacgacagggccattatagtgtcctcagattagatcttagcacaatggctttaacctgcttgatgaatgaataacagagggaagaaagaaaggaagtacgtgaagggggtaaagagaaggaggtgaggggatgaggggggaaagagtgacctccaaaaatggactggcccaaactgggccaacctgagctaccctggaagacgcaagagggctcactctatcccagggatgaacagaggactctggaatcctcagatgtaatggaaaagtcaatgagccatattgtactcaaaatatcttgttaataacaaggctattggctttgaatgtttggaaatcatccacagagtagtttactaagccacaaagcaattaccactagcacccatttttcataaagaaaccaagaaataatattctaaaattggtagctggtgtcatgacccaaccccagatctggacagagtggttctccatcccatggacagatcctaccaggaggtcttcacgtaggtgaaggcctttgtgctgacctttttggttgcaatgtttcaagaacaagagaaaagtgacaacgtttggtttactttagtatattaggcatttttctaatgtgaactatacgaaagcaattctcattcaatgaaagaggcgccaaaaaattagagattaataagtcatcggtttctagcacgttgactgaaagaccagtgagttgtgcttgttgaattctgccctcactgcagatgtgcaggtcaaacccaaagtggtcaatgggaaagatgaagaaagatggatttccagggcatgggctcccgactagaatctgcccctcgctcatgcttctcccggcccctttagactctttagactgacatggtggagaatgtgtttgctgtggtagagaaagggagaaagtaatgagctgggccaaacagcagcactgaaagcttcccaagtcacactcagaccagacttttccagggattggaagatggagagagggaaaggaggtgcagacaccaagtaagggtttggtgcagggctctggaatgtccagaaggagcgggaagcaaaggtggcgggacactgcctgaaaggcgacaacctagtgtggccacaagagagtctgctatgcctgtccagtgcccaccagtgacagaaaactgtacaagggacagcagtcccagccctgccatacacaagaagacagagccatctgggggatggcaaagacttgccctaacccatctcacatgtaggactgacccggccccattaagagcctgtggtgggcggcccgggagagtgggggccagggcagcccaaaggtgcacagggcaccgtggcggacaggccccagcttgctggcctctgagacgagctggtttgtttccatccctgaagcctttggacgagctggatgaggtcttgataactgagaactttggaaagcttcctctaatgagactgggaagggctggcagggtgggggcaggggcctccccgaggaagcagctgggggaaggatggattggcatttccagaggagactttacagatggcgcctgatctcatgggacacgattcagcgctcaatttggggctaatttgccgaatgaggtagttccatcctgacctctccaggcatggtgggtctgggaagacaggagccaagccttcctcctaaaacccctggtgatgaacagtggctgagaaagccagatgtggactcccagaatgcaatgggaaaaaaataaagaaggagggctgcaaaggattctgggtgcggctgtgagctgaatggcaccttctacccatgattctgatcctgacacctggcttagagacagagccctccctaccctgatcctccaaagccctggagacaagggagccagctggaggaagagccttggggcttccagggcacaagcatgtgacagtgacccctacaaaactcggcaaggaccacaaagttccagcctctgtttgtttcagagcggcaagcacagcatgggagtcagggggtcttcagcctcagagacaagggcagggctgtgggtctgtcttctgggcctgggaatatgggggagcccccagctaggctgtccgggtcacccttctggaatcaccagctctctcccctctcctcagtggcccaggagagagggtggggggcatccactcggcatgggccccatggtgggagcccagcccccctccccagcaggaccccccgaagctgcacaggcccatctagatctccatgtccacagggcggatgttgcccgtcttgtgctctctgacccacagctccctgtctttggccgggtccacttttcgaagcagctgatccacgggctcgactgtctgcaagagacagagaaaatgcgacactgttagagacggcggccaagccagggaggtctcctctgagacatgctgtcctcaccttagtgtctctgagagcagcctctctagagggctccggggccccagggggaggcccatctgagggacagcacatgaagagggctgtgaacggggaacccagtatgcatcccgaccctgcttctcaccctgcagaccccaggcctggatgagaggccaggagggccttaaaacctgtctctatcccttccaccccacatttaccaccagtgaacaggacaaataaaacttgagctttaggtattgtgaatatttctagaagttgttttttttggttttgttttttaagaaatttaataatgtcttcagctactgtaactgttacgagcttctttctcctcagggtaacagctcacgtgtgtgtccacttcatgtgccagggtcggaatcacacagacgtccaggacaatcctgagaggcccagtccacgaggccacccccaggccagagcacctgcccactgcccgcctttagggcagattcacttgcagcagccacttaacctgccacggcctagcgccaggcggctctccccaggccccgtgtcgcccgggagccccgctgggctggaaactcacgctttggttgaacatgtctgtttcatgccgcagctgcgtgtactggcacaggtgctgccggatcatctctaccctctccacctccagccgctctagctcctgccgagaaagcaaaggccagagaactctgagcacgtcccctccacttgggggtccccccaccaagaccacaaaacgcaagtcactggctgtggacattctgtcccatctgactctctggggtctgatgaagagcgtgccccatatctaaggtgaaggtgaagctgatgacagcagcagcggctgttttacttcctgaaatcctgctccgccacgcacagtgctgagggctttacgtgcgttccttaactgtcctcgttacaattttaagagatcgtttctgttattatccccattctccaagcaagggaactggggaactaacacctagagaggcaacaacacagctcacccaaagcgacacggaattatgggaggaacaggatttaaaccagagtccatcaggctgttactcatggcaatgcacccatgcagccctggccctggtgccctgatggggtataacaagggggcacatgtgggagctccatgccacacattcctgggaccttgtccctgggcctctgctgagcagcctcccttcctctgcctatgcctagtgctgtggccgcaatagagaccgggccagggaggcagactgggctgcacgtggcacagcttttgtcaaaggggagcgtggaaagggtttgtcctctggtttctagatggttttgtgtctttggaatctaggggatccggctgttactctgcatacaactaggtcactgcccaggtgattaatcagaaaggggggtaaagcagggggcttaattaggagattaaccaggaggaaaactaggtcactgtccctggtggaggcctctaatctgctctggtgggctgacacctggggaaggcagctggttagtcctgtgctggatggacaggggtggctttaggcagtgggctgatccgatgagcacctggcatgatgcctcctgtcccatctggcccaagtaccagccacacttcactgtccactcaggcaggtgctgactgataaggagatgctgcccctttacaagaaatactcaagagcatcatcggccctgccgcctgttgttcacccttggtgagaggcctcccccaccccactgcctagctccatcctcacccatccatccactttgcaaggatctcctaccaaggacctgcaactcgtgtgtgtgcatgtgtggggcggtcctctcttcctatagcttggctatttttcctaaagaggcccttgtccacttagttgaggagagtcctcagttgaccctgacctctcaggggacagcccaagaaggatgtagccatatccaacccaaccctgcccacatccacacagctaggaagcgctggagcagagatctgaatccacataagctggctcacattgaggtttcgaccccaacactgaagtagatttgatgaccatctccagggtcactccaccccatcatccccgcgcccaccaacaaccaccaggggctgctctgtgtcagcctctgtactgccatgtccacacatccctgcccgcttaccaatgtggtggtcaccatctcttcaaaccatttggactgggcctggttgtagagatccacacagcgcatgaggtcgtctcctggaaaaagaccacagtcaccatcatgaagcatcctatcctcaccatgactctgtgccccaccctgagccccacagccaagccttctcctccccctggggtcatggtggccgctggaaagctggaaaagggatggcagtaggaagaagaagaaagcagagccagggaaggaagggggcaacccagccccatgagaacccagctcaggtgtccccctgaagcctgaccccagataccaaggattcaggatggtggttctcattttgtgtgtgtgtgtgtgtgtgtgtgtgtgtgtgtgtgtgtgtgtgtgtctagggtattcctaggacccccaatcctatcatgagcccaagaaatgcttccctctctaaagatggcagttttattttacactggggagtccagattggttaaaacatgtcacacacaatttggtgctaagaataattaaggaagataaatttgcagatcatgtaagtgtgtgtgtgtgtgtgtgtgcatgaacacactgcaagatgtccttctgaaacacaaaagaacgcatctgtagtcacagtctaaaacatgcactggaggagcacaccccagcttcaggagagtggctaccttgggaaacagagaaagggtgagtgggcaggaatcagctccttctattgcattttatgtcatcacagaaagatccgaggcaaacataactattcaatctttaggactactctattactttgttatcatatgtatgtttagaacattttgtaattagaaagaaaacacactgcgaagtaattgcaaacattactaagcgtaccagcaccttggaaccttgctacacaaatcacagtctgtgggccagtggcacttgtatgccctggggtcggctagaaattcagaaacccaggacagatccgagacctactgaatcagagactgcatgtttatgagacgctctggtaatgtgtgtgcacgtggcaggcagagcagcacagctctcatgcacggctttgtctcagcgtagcttcctcatcctcacagggctccagcaagaggaaggcatcatggtgtttgctcacgatggaaaaagctcatgagtgaaccccaaagtgaagtaattttctctagtaattctagaagcagaatgctagagtagaatttagtaattcgagtagagtcaaagtgactcctatagtatcatcattgtggctcataggtactctgataggaaagtcaaagagaacagggaaggttatgtctccaggccccaggcctagctgcgaaccatacccctagctatgccacacaccagacgcgagtgtgccttgaataacagagcccacaccaaggcatttattcattttgttcttggtccaaggccaatgactggacccttgatcccaagaggcactgaaccggagagaagaaagtggatgctgcaccgtaaaatgcatttttttctttttttttttttttttgagacggagtctggctctgtcacccaggctggagtgcagtggcgcaatctcggctcactgcaacctccacctcccgggttcaagtgattcttctgcctcagcctcccgagtagctggtaccacaggcatgcgccaccacccctggctagtttttgtatttttagtagagatggggtttcaccatatcggccaggctagtctcgaactcctgaccttgtgatccgcccgcctcagcctccgaaatgcaaatgcatttctagcaagagctcctgcctggccgaggaggagggcggcgtgctgctctgtacactgtgaaactccctgagccctgtgtgtcaatgctgattttgagaaattgcttcaggaacttccacagcattgggaaacagagtaggtgaagggggctgtaccttctctctatggcagcccaagagcttgaaattggaactttttagaacagtattggtt[159 bp omitted]ataaaaaattagccaggcgtggtggcaggcgcctgtagtcccagctactcgggaggctgaggcaggagaatggcatgaaccagggaggcggagcttgcagtgagcagagatcgcaccactgcactccagcctgggcgacagagcaagactccatctcaaaaaaaaaaaaaaaaaagcctttgttgtcatcccagctcaactacttattagctatgtaatcgtagacaagtcggttatcctgcgcttgcctccgtgtcttcatctgtaaaatggagataacgattgtacctttaccaagttgttatgaggaataaatatgtcaaaatatgtaaagcacttagaatagagatgggcgtagagagccaaatattaatatgggctatggtggtgatgaagatgatgatgatgatgatgatgatgatgatgatccctgaggatctgatgtctttccttctagtagccttggaaaagatgaggaagagggaggaaaggaacagaaggaaagaacaggtggcatttcctgagcaacaggctgtccagcaaaatggcgacaagcagagtctctggaatgagaggagactgaattgtggcttcgccgctccaccactgtggacctcatggaaggttctcattttctctgccatcagtcttctcatttgtaaagggtataaaaatacctccctgcagggggactgtgctgatcaaaagagacaatgctctaaagcatggaggctggccacagcgagtgctcagaagaggcggtatttttcagagttaggtctaaggactgtcactttcgtcacaaaataattccaaactacaggaatgagagaccgtattatctgatgacaatgcaataaaactatgtaaaaaaaaatagcaagattagaaaacaacaacaaagcccttgcttgtaaacatataaagattttctttgaaacaattcttggttcgaagatcaaatgaaaacccaaatagcaaaacataatgaaaatagcagaaataaaaccaccacaaataagaacctgtggaatatggttagaccaccagtgtaaggaaaaataaatgtctggtgggttacatatttcactgtctttttttgtttgtttgtttgttttgttttttgagacagagtctcactctcttgcccaggctggagtgcagtgctgcgatctcagctcactgcaacctctgccttctgggttcaagcgattctcctgctttggcctcccaagtagcttggattacaggcacacaccaccacacccagctaagttttgtatttttagtagagacgaggtttcact[138 bp omitted]acaaaaaaaaaaagtaagaaaaaaccctctaggtgattaaaaaaaaagatctaaatcagctccgaaatctaggcttcttatgggaaatatcactgtacagaaaaacagcaagaaaaaatagacaaacaagcaaaaaaaaaaaattacaaagaacaaaactaaaagacaaatgacaatctaggaaaaatatctgcaattaaaatgaaaaacgattcatctccctgatagataaagaatctatggtcagtggggaaaggatatgagttaatcagttcacagaaagtacaacaatgatttatatgtatattttacatactcaacctgggttatggagaaaagcaaattaaaaacaaaatatcatttttccccactcactaccaatttcaaatcttgataacacacaatgttgataagcatttagagaacaggcattattcatagatgctgttgataggtgctctctctggaaagcaatttggaaatatccatcaagacgaataataccctttgactcagcaactatattctctctatatgcagatctggtcttaggcacacacaaagatgcaggtacaataacacagcttcactggctggcaagcactctgaaacaatctaagagtcctaaacctcagttaagggaatgatgaaacaaatttgggtacaatcatacaactggacactggccagccattaaaaagtttgatatgcatgaatggatgggcaaaaagatttacagaaatgaaaaagaggtatttccaagatatattaaataagttcagaagatagattgtatgatcaaatgtatataaatttaaatatttaaaaatcaaaacactaggaagagatggtgattatttctgtgaatagcattttatattcttgtctgctgattaaaatattttgccatgtaccaatactgtttttgcaatataattgttttttgaggtagagtctctctctgtcacccaggctggaatgcaatggtgtgatcatagttcaccgcagccttaacctcctgggttcaagccatcctccaccttagcctcctgagtagctgattctacaggcatgcaccaccatgcctagctaattttttcaaatttttttgtagagatgaggtactatgttgcccaggctggtctcgaactcctgggctcaactgatcctcctgcctcagcctctcagactgccggattacaggtgttagccactgcacctggcctataagttatttttttaataacttaataatttaaacagatctcttccccttctgtgcccccccttctctctaccaataaatatactgtgccctctacttcttgatcctgtaatttattattgtgcattataagatttgtataataaacgttatccttctattacattattttttattgacttatttctatcttaccttattttgaaatgtaaggtggctgctttcttctataatgaaggaattgtaacaggttcaccagaaattgaggtgaaagggacctacagaccaaactctaatactacggcacacattctaattccagaggcaacatgcgtgtcctctcgtgcagtgaaacgtggcttcccttagatctagttaccgaggttttcactggttctaccaggccttctcttcctctttgtgtattagctaactttgaccactaggtggaagcagaaaccaactcattgggagactattcccaagagactgaaatctggttatttctttaaacaaagtgtcagcctctgttcccagggcaggagcccatccccataggtgaaccttcagagagagcattgcttcctggggaagtgggcagcttgggtgagctgtgtgcttctgtgggctctgaacagggacagggccctgagctctcagtgcatgaaggagtttgtccacctcctggtcagagatctggggcttgggcggaaaacaaaaaaagccacgaccagggagagagtaaggagtccagcctctaccatgccccagaactagcccggcctgtgtccttcctctgacccccaaagtctctttctttgagatctctgggtgtgggtcagagagaagggaagagggggtacctcctggcaaacaagggaagtaatttcctcgctgcagtcttgcaaaggagagatgcaccctcgccagtcacctcatctcctagccccgtgccctctccttctgtgtgcactgaccaggccaggcgggtgcccagcacttaccagcctgtgtggactttctccgcgccttcttgatgtcctcctctgtcttgttgctcagcttgatctccagctgctgggtcttcatctccaggtctctctgccgctctgtgagggctttccgggcctggggtccaaggacacggagaagctgctcatacagctcggagccagtgggcctcctgggccacgcagcccagcttccctttggagtcctttcgccccttgtttgtgtggatgatgccacagtggtccagagaggcccagcagccagagtggcaccacccagctaggtagaggctacaacccaactcttttcgtccttgcctcttccagtgacatctggactcagcctacctcaatctctcaaaccacgtttttttcccgatggagcctgtacaaagactggggacctaggcagtcctaaagtcacagcccctctgcttggaagggaccacaaaggccatctgtgtcacctccctgcagcacttaataggatgtagcaacagccctcccgttctggagctggacaagcctcggccctcttgttcccctcactgtactgcctttcctccaggccaccactggcatctctgtggtccttgggtggcggcagttggctgggcccagggtgtcccagcagtttgagcccccttctcctctctaaggcactggggactgggaatcagtccctggggcacactctcttccctctaaggctgaacatcagttccctggaggtgagaccacccaggactcagcctcatccctgagcaggaaggagagcagggaggcggtgactgagtcaggacgactcagccaggtgaggcttaaacacggggccccacgtgaaccagcagcagcactgctaggctcggggtttaactggtcgccaacagccactcgactgcccactgcagctgcagcctctcctcgcacccctggccctctgggtggtcattccagcaccacagggaggcagctcctatctgcccttggatgggtggggtgctctggcgtaggcacgaggcttggacatccccctattcccctacctggggacaaagactcagccttggcgtatggagccactgctggcttcccagtcccccttcttccaggcagtcccccatgcacctgccctggcccagcgtcctgggcctctcaccttctccaccgaggcatagcggctggcgagctgcttgcgaaggtcggcaatgtggtggtcgcacttcttcatgtctttcttgaagttctcacggaagttcatcaggggcttctccacctcgctgtgaagctgttgggagagtagagacgcacactcaggacccagggcatcagctgtaagccagtgcagggaggagggatgggaggggcacccccacttccccaggcaagtgaggatgagtctggggtagcgacctggcaggaaggtgagagacaccccctgacacgtggctgcctatcaggtctcagcttaggcaggtcaccttagctcaggaggcccccacacacgtctacaggataagtggttagcaactagagccttctgatttccccatctgttaactactttttttctgagcttctgcagcttttaaatttttagaattttttactatttatggtttataatatgctgttttgaaatatgtatatattgtggaatggctaaatcaagttaataatcaatgggctgggcacggtggctcatgcctgtaatcccagcactttgggaggccaaggcaggttgatcacctgaggtcaggagttcgagaccagcctggccaacatggtgaaaccccatctctactacatacacacacacacacacacacacacacacacacacacacacacacaaattagctgggagtggtggcaggtgcctgtaatcccagctactcaggaggctgaggcaggaaatcacttgaacctgggaggttgcagtgagccgagattgtgccactgcacttcagcctgggtgacagagtgagacttggtctcaaaaaaaaaaaacaaaacaaacaaacaaaaaacaataataatcaatgacctcacacacttattttatcccacagcttcttgcacggctttgttcttatgtctctctcccttattttccgaactgagagctttctggggacagaaaccacatcagcgtctgtgtctccaagcactcagcacagtgactggggtacgcggcttcagtaaagaacagtcgaatgaatgccattcaattagaaggtctcaggtcagtcctatttatcgaacatctactccatggcaggtgctgagaatacaaaggtgagctagacagggtccaaacctcgaggaactgatggtgggaactgttggagacctgctggaaactcacaagggcaactgtcccgcattgcgctcataaagacattctcagcttgctgggctgcctggagcacaggcaaagggaaccgccctgtatcccaggggccagagaaaagggtttatgctgtcagaagagctgggtggcatcagggttttaagcttttttcttctcttttattccttccctctttcccatcccacccccctttaaaagaacttttccttaaaatttgt[146 bp omitted]ctcctgtctcagcctcccgagtagctgggactacaggcacctgccaccacgcccggctaatt[181 bp omitted]gtcaaagccaggtggcaccctagccctgtgcacccctcccaccccactgcctggaatcaggcaactctcttcaacctatgaccaccccaccaccgcaaatctgcctccaccggtcttagaggtgtctctagggagcacagctcaacttccctggacagatgatatcccaacgagggttctgtgacttctctcctctccctcaggtttttgctgtacaatatctttttctctggatacaaccaggacttaggtgtccctattctaagcaactgacttacacggggctgggagctccaagcgggcaggggccccatctgggttgagcactgctgtgcccagtgtctgacctgggctggggctgggtgggtgccccttctgtgtttgtagagagaatgacaaactcttcagagctcaatcccctgggtgacaagaagacagctttgtcgctggatgaccgtcacagactaacagagaactggccatccaaacacccctctctcctcctcgtgttagttgtaaatatgtcctactattttttttgagcccctggaaccttccctgtataggaaaacatccccacctggcggcagtttgcaggatgctacaaaaatcttgagagcttacgagaataaataaacccctttcccacgtatataggtttggcatttgctgagtaggagcagctgtacgactccgggaatctgggagagttagctcagcctgctgactcagaaactccggggtctctaaggacatggaaagcaagtgactttcaggctttaatacgcccaggaatgacctgaagagttttcaacattaaggtttcctggaccccagccccaggttctgtggtctggggaaaagcccatgaacctgccaatatgccaggaagctttccccaaattcaaatgacattctggaagcgtgacgctgctaactatcacaagtgatttgattccacagatgaggatgcctggcatctccatctcgctacagacatcaagtattttatttatttatttatttttttgagacggagtctcactctgtctcccaggctggagtgcaatggcgcaatcttggctcactgcaagctccacctcccaggttcaagccgttctcctgcctca[213 bp omitted]tttttcctttaaaatggttaggctggtatctttagtacccattcttaacttttaagcatctctgttgaaccaggaatcagaagtccttcctcaaagtgtcctcacagactcaggccggcctgtcatggcccatcagtttttctttccaaaactctcgctctctttgcttccttttcatctcacacatcagaagagaataagagaagttccaagttggtaggaatttcagacactgtctagtctgatatttttcagacggtgtgcggccgagagttgtgaaatcgatttaatgggccaggaccagctttttggtgagaacagaccagacttgaacagaaaataccagagtacattttaagtaggaggataaatactgttttatgaaacgtttgtttcagctacagatgtgtgtgaatgtctgtgtgcagatatcggagtggatacctacagacaggttctgaatgctcacataaaatgcatcattgtaagtcactgtcagataagtgtaaagagactgatctggtctgaattcttcatttcatatgtgaagaaatgaaaccccaggggagctaagtgacttgctcaaggtcacagagcttgttagtgacaatactgagatacaactcatgtctcctcactcctgtcccctaaatcttctgatggaacgcagagcctctaccgcatgagattttctatcagcagaaggaattctgctcttctcccttcttcagcaggagccaggtataactttctttgtatacggctctctcatttctttagcaatctgttgctattagcaatggcttgagctaatggaccagaaaaaccacaaaaattgctgcaacaaaattgcatttcttaaagagcttttacccctgacacagagcattcagagcagaatttcaataagtcttttggagcagacattaaaaacggtttttggcatatggagctatattattcatggcagtcaaatacatccttggagccactttcttctcaaggaatcgccataaaaccactaggctgctgcgatgaccgcttgaggccaccaacactgaccgacaggctggaagcagccgagagcctctcgtagcaaagtctgttttgcatgacgggtcttcatgagcttcctgtcaactgaatggtgaggtccaccctgtgtcctgaacactaacttaaaatgttctgagcatgtggttgtccagggccagtctgcagtagcccattggcaacccctggaaaggcacaggctcaagaagaggctgtgttttcaatgccattggtctgccaaagcaggggagctgctggaagaaaagctctggggaccaagtctcccattcgctcagtcctttcctttgcttcctctgtgactgaacccacctggctgtgtgaccatgggctgtgatctcaccccacctcttctcactgtgaaatgtgtatgctatctcgcgtggtggttgacggcaatgagttatatcctgcacacagccatccacaccacttatgtcaccactaccacgtcggagagagttttgccacctgttgagcactctaaacaatcaagaatcaggggtcctgctgatggggagtaaatgccaccaagattcccggggacccagcaggtgacctttccaaagctcgcaactctggctcccagccccaccccatcacaatggcagcccgcccaggatcttcccagtcaatggaagtttctaccacagcagagaatggagctgctgggggccccgacaggggaagggaggccttgaggggaaagctactcatgatctgcagctgaaaaataacttgctgttttggatgcaatgcaggaaaaagatccattcacggagttcccttctctgccaggacttgagtagcaattttctactgaagcgcttggtgtaatgaggttagttagcatgccttcactggctgggaattctcactcacatctgggtgtcaactcaatcttggggcacactaagccatggggagctgtagcagctctgttccctcttccaacccagctctttagaaagtcctttcacgtgtctcagtcatctgagtcattcattctgccttctgtgtgccgagtaccaccacggggtacatcgtatgggatcccaaagcagggacttgcaattgcagtaggaacgacactaggaaagagacaggaccagtgagtgctgaacgtggaagtcccaggaaggagcgaccatctctgagggatgctaccttcaaatgatcaagcacgtgtttaaagaagggagactcagcgtttaggcactttaccctgctgtgtctgactagtgatggtgggaggacagagggaagag[132 bp omitted]ttctgcctccagggttcaagagattctcctgcttcagcctcccgagtagctgggactacaggcatgcgccaccaagcccagctaatttttgtatttttagtagagatggggtttcaccatgttgg[131 bp omitted]caatcatgtacactttagagtggattacttcactgagagatttagtttatttttcatctaaaaattagctgagagtcggagagaaaacctggaggtatgtgccagggagtggggaagggagagtcacttggaaacatggagaaatcttgagagaaagcagacctgaaaagactgggggtggggtggagatagtcagagggctctgttcattcatgactcaataagaaaatatttattaagcatctactacatgcaagacaccatcctgagccctgaggatgggaataggacagaaacaccctgccctcgagtcctggcactagtatcttcagaattaaatgaaagagggatgctttatggtcgggagtggtggctcacgcctataatcctagcactttgggaggcggaggagggtggatcatgaggtgaggagttcaacaccagcctggccaacacggtgaaaccccatctctactaaaaatacaaaaaattagctgggtgtggtggcaggcgcctgtagtcccagctactcgggaggctgaggcaggagaatcacttgaacccgggaggcggagcttgcagtgagctgagatcgcaccactgcactccagcctgggcgacaaagcaagactctgtctcaaaatcaataaatcaataaatcaatcaataaataaatgaataaataaataaagaaggaccctttacttgttctgaaattttgcaacaaccacaaatttaaaaaaaattctccctttggcataacctaatgttccctgacactaggaagagacaggacatcctactccatccctttgaaagccaggcaaaaagaaagcagggcttcgtcactcaggggctgccctgagaaactgggcaggtgtgctaaggcctgctcccagtggctcccaagagctgaatgttaaattttcaggaattctgtttgctggttgttaaacacggccattatcaaaaaggaaatgatatgaacttataattgaataaaaattatattaaaaacgaaggtaataggccaggtatagtggctcatgtctgtgatcccagcattttgggaggtagaggcaggaagactgcttgaagccaggaggttcaagaccagcctggggaaaatagcgagaccccatctctacaaataaataaaaaaattacccaggcatggttgcatacacctgttgtcccagctacttgggaggctgaggtgggagaatcgtttgagcccaggaggctgaggctgcagtgagctatgatcatgtcactgcactccagcctgggcaacacagtgagaccttgtctttttaaaaataacaaaacataaaaaacaaaggcaataaatacctagcacttaccacctcctaactacactttactattttccatgctcttggtggatattgatggttatttgtgctactgtgtctatacaaaaatgcaccacctcatggtgagccactgggcagatatctcttcccaactccgtattccgtgacttcatgttgatagcctgaagtttacaccagggaaaatggcaaacggcaaactggagagacagttgttaactattttttagtaccccagtgtgtaagaccaactgagggtggctgcagggaggggttaccttggcagagaacttgaggtgaacttctgcttcgtccgccaggctcttcttcacctgggcccacgcctctcccaaggagctgcaacacaaagaccatgagactcaggtcacaagccaaagcccttcctgaggcaggatggtggggctccaccccaggtctcggggaggtatatgacagctgagaatgtggacgcggatgaggcagaagtcaggcagaaaccagacatgagcatcacgtttcaactcacagagtcagatgagccaccaaggtccaagtgagctcaccttacctctggagctaaggaaacagactgtggcgcacagccaagaggtggggggggtggggattcctagaaatccagaggctcgaaaggacccaggaaggtgccggaagcaggtgtggggacattccaaagcctcagctgcagtgagggccttgacccctgggccgtcactgtccccagagctttcacatcacccctccctggtttgctgatgaggggtgcaagcatctgctaataaatcaaggaaggaaaacaggttctattccagggagaagctcttttcatttgtttattagtttgttccttgagacagtcttgctctgtcgcctaggctggagtacaatggcgcgatcttggctcatggcaacctctgcctcctgggttcaagcgattctcctgtctcagcctcccgagtagctgggattacaggcgtgtgccaccacatccggctaatttttatatttttagtagagacggggttttgccatgttggccaggccggtctcgaactcctgaccaactgagagcagctgcagggaggggttacctcggcctcccaaagtactgggattacaggcataagccaccatgcccagccggagaagctcttttcaaacagcaggtatcacacagcgctgcttataggaaaaacccagctccttggcttccaggagtggggaagatggactgtgtgggtctagtgacctagatgcagccacagggcagagaaggctcccacggccatcctaggaagcacggtctcctctagcactgcttctctagctgtgagccctgatgctgcccacagcttactagagaagggccaagtcctcttagcagcatcacttctccactccaaggagaggcttcacgtagaagaaatctcctgaagtccctaagacttgccaatgcaggccccaggctacattctctatgatttggagctctttaaccgcatgacccttccaagtgatacccccgctttcttgctcccagcctcttcaacacagccagtaaatccaggctgaatgttctgttgacttaatatcatccaaaagccacttcccccagagaattcattaaagtcgagtggcaaaagctgaataaaagacagcatgtggtgaggcttctgggtctggagcagagcagccagcagcgaagaattgcccaacagtgcacagcagatccctctgatggctggccagccctgtgtggtggtggcgcaggctcaggccgaggtgggtgtttatgggaaatgactgcctgattttatctaggagtctagcagcaaagaaaggtcccctcagtgatcctggcaggggaagccaccagagaagcactggagtatgaaacggggcaatccaagctgttgacaattgtctctgcctgaagggcctgagatccaggaagctgtactggggcactccaccccctctgggtggcttgggtgccccacctgattcaacaggtgggtaggaggtccaggggtggcaggagtagtcctggcagttacacagatcagcggaacagaacacaaagtcacccagctagggccgattgactgcagcaaagaggttagggtgtttccatgggggaaacagatgatctttttaacaaatggtgcagagacaaccgtacatccacaggaggaaaaggaatctcggccctacctcacaccatacacacaaattatctcaagatgcctcctagctctagggtgaaagccaacactatttgaagcataccaaggttgtcctgggaggaatgggaactggattaaagggaagtgagaggggtttgcccctgcagctgagccacacacagcagcctgtgggaggtatgaacaagagtcacagagccaaaaaggccccaggcggtgcccagactttgtatgagcacatgcatctttccacagagctgtcagtctactgtcagcagagcacatggcaggtaaatggcccagggacagtcgtggtggcctgagaatgtcatctctgggcaactgggatgaaaggaagaaccatggttttcccccacccaacacaacgtcctcagctctacctccaggccagacactgctaagtgggaagacatgtctccagacattcagaggggcccctctgagccagtgcatccttggtgaatgcctccctgctctccaatattccaggctctttggagtcacatcaccatttattaaaaagctacttacaaattctctcatttgaaaagagatttttcatctgataaacggttaatgaaaaacaaaacaaaacctgaggtgcatctctgttccaacatacagtttcaggtacgccaaatcaaaatgcatgttgttttcatgactgccaactaggaaaaccaaaatcgcatttcctttccacataggagagaaaaactaaaggcagaataaacaaccgaattctgtttatttaccaatgtgcacatgtcctgtgaaatctaatttggacacagaagttgaattgcaaaagcctctccagcctccctgagcagcatcttcctcaactgctccaaatttctagactcctgctttgctttgaaagtcttcaaggagatagggttaaatgtccaaagctgtgtgtaaatgtaaatcagtgtctttgcacgttgtacgtagggggctcatgtgttcatgttccagtgcctgctgcaggagtgtgtgcatggggctgctgtgcgtgcatgcacacacagagtaatgtgtacacctacgaggcagtggccctgatgcatgtatgtgagcttgcgttgtgtttgtctctgtgtttgtccgggcatgtgtgtacagtatggtagtgtgggcctgacttatggagctggactgctcgggtgaggagcatatgctgtgcatgttggccaggacacagtgtccttggcagcagcccaggctggagagatggaagccggaagactccggagtggcacagtggttgcagggcacggggatacttaggaaagccccttgccaggcagcaagagctgctcctctatgtgcccccttcctgcccctatctcaggccccgtgcatggagcagaaggaggccaggaatgaactaacctcatttacatctgtggaagggacgctggtcttgctgggccgccctgcggtctgtggctggcagggagggtgagaaccattcaaaggaggccgcctggctgcacagccaacccatgtggagggcttaatcaaagccacatttgggttggcaaaatctcagtctcctgaaggatttcaagccacgaaggcagatttggactggtttaacatcatggctcgctgacgaccacaaccatcccacaacagaacgtcttccttcctcgggggttcactcccccttggagaaggaattcaaacagaccagcaccagagggaggtcagaacggagaggacctctggggaccttttcaactctaacctcctgagagtctttctgtttttttttacagaggtgaaattcatataacataaaattaaccgttgaaaagtgatcgatccaggcgcatttaggacgagaccaaatcaaacgcctgttttgtgagtgcaactaccacctctatctagttccaaaacattttcgtcatgctagtatggactaaaggtttatgtcctgccaaaattcttaggttaaaaccctaacccacaatgtggctgcatttggcaatggggcctttaaggaagtaattaaggttaaatgaggtcataagggtgcagccctgatctgataggattagtgtccttataaaaatagacattggccaggcgcgatggatcacgcctacaattccagcactttgggaggcca[270 bp omitted]aaggctgcatgaacacacaatcagaaggcggccatctgcaacccaatgggagagtccttaccaggcaccaaccctgctggcaccttgatcttggacttcccagcctccagagccacgagaaaataaatgtctgtagtttcagccacccagtctgggacatcttgtggcagcccaagcagatgaatacacaccccaaaaggaaacccggtaacttttaagcagtcacaacccattcccctcctcccccagcccctggcaaatgacaatccactttctgtttccatgggtttgcctgttctgggcattttacataaatggaatcatacactatgagaccttttgtgcctggcttctgtaacttagcagaatgttttcgaggctcatccacacagtagcatgtattagtgttccattccttttcatggctgagtaatattccattgtctatccatgggtatccattgtgcatacaccaccatttgtttatccagtcatccctgggtggaatgtgggttgtttccaccttttggctattatgaatattgctgctgtgtacatgtgtatacatgtattagtttgagtgcctgtactcagtttttttgggtataagcctaggaatggaattgctgggtcacatggtaattctatgtttagctttttgaggaacaaccagattgttttccacagcggctgtaccatattccatttcccccaggggtgcataagggctgagacttttttacccactaggagtccttctgtggctgggagggttgggttaagcttctcccagcccaggtcccactcaaggaggtctggacagtcacagcattagcgggaagggagcctatgcctcaagcccacaggagagagctccagacaaagcggccaggtacaataccctctcatacgcagcttcctcccagcctgcccctagacaaagggaggctggagtgggcatctagaggctgctgcccagctaccaggggtcagaccagaggggattctgacatacttcaacatctggaacgtggctcttg[137 bp omitted]tgcctcagcctcccaagtagctgggactacaggcactcatcaccatgcccggctaattcttgtatttttagta[137 bp omitted]gcccacaccttgagtcatgggtgcccacccaagtcatgagcacctacctgagccatgagtgcccaccttgagccaggcctatggagagctccccatccaaagtggggccatgccagtgatcagtgatagtggctgatttcccttcctcagtgaccccccatcctccccactcccacctctctcctacccactcacccttcctcctgtgaagccaaggagttctgagagagcttagctaagttcttcgcatagtcttcttcaatctttatcctgcaaagagagaaaacccaacacacatcagctctccagtgccagatcgtgggtctgccctgctgccctgcacacctcagccgtggaaaggaacccactagaccataagctctgagaccacatggctcttgtctgtctacctgacatgcagtaggtgcttaataaatacttgttggataaatgaatgaacaaaactgtctggacctccatctcctcatctgcaaagtaggacattttctccggtctcctagagctgtgaagacgagagctgtcgtttacacagttcctagcacagaacgggaaacataagacccctgaaccaataaatgaatgaaggaagaaatgaacgtttgcaactcgtgatggactaccagcaatccccagtgctgtcccctctcccttccagccccagaactcccaggtggcctcggaccctcagcagcagaacagaacatctccctactgtctcacacccccaatgcctctgattgtcaagcctgctgggtacaagtacttccacggaaacctagcagtgcccagggctgcaggtagattctatttccctggagaggaaagttgccttggatgtagcttccggcaggcaggcctttgacacatttgcaaggcaactccccagggagtgtcctgtattatctggcacgtccatgttaagcatgttgtcagaggtattgttcaccacctaagtggtcctctgggccacagtgggagacagaagagctatgcttatgccaaccagagctggccagagcccaggcttcggagagcccctggtccaccacacggtgaacagagaagctccagagatgctgggaccacagcgtttgcttcccagctgctcaagcagctggcacccaaagggtgcgatgatggagagagggcggctgacaaagtctggcggcagcattccgagtaataataattgcatgacttggcatcaggagactcacaatctcgttccttcttgcactgctttcccctcacctccaccttcaactggtctctaggtcctcctgagtctcattccaactgatctgcctctgtcacttcctctccatccccctaccttcacctccagactgtggtcaagagagatatctagaaagtagatctatccatgccacgctcccggctcctcaatgccgacagcatgcaccagacacacgaggtgcatacgctgtctgcctcctgtgtctcacctccaggacgacagcgtgcgtcacctctacctctgccccacttctctaaaccaagatcccagcaaaccagccagcacctgtcctcaagccaggcgagctcccaattctgagcctcagctctcacctctcctggcactaaagggccttccctatgagatcccaaggtggatggtgtatgcgttttctctaggaagcccggaatgtcctgaaatggcagtttccaattatttgctaacaagacgttgtcatggaaatataaaccataagcgtgttcaagctttggcttttacagcaattttcctatttgcctattttataccattgttttctcaaacccgagctgtgcaacctctccgtttcccaccagtttaatgggtcataaaataaggatttgattacacaaattgaaaataggccctctgtctatgcccataccaccctgaacacatccgatctcatatgaaaataggccctctaagggaaaggggtgcttcaaaacgccgaagcattattacttgattattgctgttataattaaaaaggaaatatttttggtctggcacagtggctcatgcctctaatcccagcactctgagaggctgaggcgggcagattacctgaggtcaggagttcgagaccagcctggccaacatggtgaaaccccacctctactaaaaatacaaaacattagctgggcgtggtggtacatgcctgtaatcccagctactccagaggctgagacaggagaatcgcttgaaccccggagatggaggttgcagtgagccaagactgcgcaactacactccagcctggatgacagagcgagactctgtctaaaagaaaaaaaaaaaagaaatattttaaaaagatattgcaatttgctatatttccaactccaggtggaaagttgtgtgtttgtgtgtgtgtgcacatgggtgataggtgggtatgtgcagctgtgggtatgtgagtgtgtgctgaacagagcctcagaacttggagacagagagagaggaggaaggagatagagaaggaacttctctttctctttgtcgatttctccatttccattgggctgaatttattgtttcttcatctgtgttcccaagctctttagacaaaacactgttataatccttgaggcagggatggggtaggaggagggttcaacatctcctgccctgggacacaggttttggctaacgatgaattgaactgtaacatcccccccactggttacggtaaagggctgtgcttcaaatgatggccaggtacataagtaaaggagtgaaggagtctgcgggggaagacagtacggaatggtggagactggcaaaatgggaacacacaccccctctacaagagtagctgctactcagctccagccaagtgtcgcgtgagggatgtggaggcaatcctgccaatgcttctgctctttcaaggtgtgctaaatatccagattttaatatgaaatctacccatttttttaagtgttgctttcaatatttaaaaacactatatcggccaaaggtacacaactgctgaccagatccatcccaggcgccatgagtttgccgcctggcgctaaccagcccaatgctgagtgtgcagtactgagtcctgtgctgtcgccccgccccggccacggggccccggggaacactggtgccaggccccagggctgggaggggcccaggcttcacctttcccggatgaattctgacatttccttctgcatttgtttgcccttcagctgtttctggagcagtagttcaaacccagccacggtgccgttgccttgggggtccttcttatcagcctacaaaggaagcagaagcacaagagtttagggcacgtctgagtctggagccagggagaatggcgtagagggaggacggctcctagatgtgcctggcaatcccagtccagcacaagacgcgggagcagctgtctctgctgccctaactcggatctctctcctggtgcccccactcccaacagcgctttctgatgctcaggctcttacagttgctgcatccccacatccaagccccttaactctcccaacctgggaactgagaggaagaagggcaagtgtccaagagcaccggctgtgatgcctaacggcctacgacttccaaccaggtggctgcagatctggcttggccctcggcgaatcttggcatcctgactccaagctggactatgtgtgagctcaggagcaggtacccccagccttaagccatcctgtcttctaccaacttcttacactggtagggcagtgacaccctctaaccacacattcatacaagatcacaggagagaaaagtaaatcatagagagaaagtgggttgaagggaggccggaggagagaacaggacaggctgccctgaaatactagctgggtgaccttggccaagttcttcactcactccaggcctaagctttttcatctgcaaaactgacgaaataacagccccaccttcatgtggtcatttcagggtaaatgacctatgtatatatctgagcacattgctgagcacatactatgtacccaataaatggcatctgttattagttacttttaaataaaagtccaaacttggggaggatgggcaagtcaatgaaataagtacttagcagccaattaattttgcaaacaaatattcttaaaatttcaaaattaaatgatttattttattttacctgcatttcttcaagcataccaaatgccccttccctgccattcccctgcctgagattcacccacacatctgcccgcacggccgtggctgctggagcaccagctcccagggccatcccaggcatgtctaaaagtgtcctcctccttacagcttttccctatcaggaacccagggtcaaacactttgatacttaatggaaggtgttcagaacaggtttttgatatcccagagagagaggtgcattggtgagaacagtgtcccagcatctggtaggacccaggttcttgtctctgctcagctgcagggtgtccaatcctaggtagtatctccccggaccacccccttgaaataggggtgggttgcatctctcagatcccatccagatcagacattttaggagaggggaaagaaaaggggttgctgatgcctgcagggaaccccatttaccatcatcaagtagatgaaggattttatggacaccttcccagttcccccggtgtgggacccctccctcgggtgccataactcaaaggcctccggccacgctgctaacatccctgatgacagggagatcaccatcctacggggtcacagtcgggctgttcttgcagtttaaaagcaatgtccactgaagatctctgtgcttcactctacgaatgctacatcttgatgaaaaagcagaaggaaaattatccaaatactgagctcaaatctgcctcccttctaggatggatatgctgagctatgcactctggggaaaaccagccagaagaaacaggctttaatgactgtgtcaggagagagaaatttctattaatggaaaaggccttgatggtcagggggataagtggattgcagattaagtatcagagtccccagagagctcgaattaagataagaactcacaagtgtcgccctccggatgctgctggatgcaggcggcatcagacattcctaccagctttccaaggcttgagaccccacacgctgacctccagcaactaggatacccatttccagggctcaaaccactctctccttgaaccctccatttactgcacccctcttgagagatgatgtttccaaacccaggtacatctctccctctctgccgccaccaccatctttcctggtctcttccactcacccgtcaacttcccacccccacctgcacaatgcctatgaatcagatcacatcatattgctgcttaagaccttctaacaccctccttccacaagcagaataaaactcacttactggggcctagaaagtcttacgcactctgatgcttgcttaccccgatgcttgcttaccccgccctctgagctcacctgcccaggtctgtctgatgccaaagataagcccctttatactgtttcctcaaccaatgcacagatctctaccctggacacagcacagctggagctacagaaattgtgccttggtgagaggtgtaggcaacagggatctttgtatatcttctaaggtacaagcgattttgtagaaagagaaaagcacttttatctagtattcggttagcaaatctaaaaaagtgtagataatccggctgggcacgatggctcatgcctgtaatcccagcactttgggaggccaaggtgggtggatcacctgaggtcaggagattgagaccagcctggccaacatgatgaaatcctgtctctattaaaaaaataaaataaaatacaaaaaattagttgggtgtggtggcacacatctgtagtcccagctgctcaggaggctgagacaggagagtcgcttgaacctgggaggtggaggctggagtgagccaagatcacaccactgcactccagcctgggtgagacagagtgagactctgtctcaaaaaatccattcttgcaaagtggtgaaaacaaagtttttacttatttattgttccttggagtctttggacacttgtttttttgaaatgtacaatttagtggttttcaatacattcacagggtttgtgaccatccccactatctgattccagaaaggggtgatctaattctgaaagtcactatgactttaacatgcaaatggcccaggaccattcccaggatattctgaggtacaggactctgcatttctacaaatttatttatttgaatggtgaaaaaaatacatctagcacacaacggaccattttagccatttttaagaatgcagttcagtggcatgaagtacattcacatggttgtgcgaccatcaccaccatccacctgcaaaattgtctttaatcttgcaaaactaaaactctgtgttcgctaagtgatctgcaaacgttttaaaactacaggattacccaagctggagctctctgaagatcctgtgcccaactgcctcacaattctgatgagaacactgaggcccaaggaggtgaagcacttgtccaacgtcactcacgtaagtgacaagcaggtatggagcccacgttcatttattgaggcagattctagtctcctgccttcactgagcatcggagaaaatggccccccgcttacctacattctggttgaagtgtctgtaatgtgaacaaaagtcctgctgaacccctgagattcatggaatgagctggaccccaagagggtcctaagttcctgtcacagatgcaaactctaacaccagcccttcacgctccaacgagaaaggcccctccactttgagatccaggtccctcctacccatcctgggtgtccactcccggtcaccggggtcacgctgtgggggaaactgaggcgctgcttacccagaagtagtcgcagtagctccactcggttggtttcagcagctgctgttccggcatcgtgtctgggtgagggaacgtcacacagtttatctgtagggcacagaacaagaaagaatgaccccgctggagactggaatagcgaggaaggcttcggctcctgggggacacggcactggagcagcctccctattgacagaacacgcacagggatcttcccgtgctccaggggccagcatttcacatgagcggcaacaggtgctcacccccaccccaaatgggctgtgaaccagtaccacctctctagatggcagtttactaggatcaaaattgcaaacttcaggtgcctttgacccagcaattgcacaagagtctatcatacagatacagttgcatgggggcagtgacatccacacacgctttttcacgacagcgctatttatggccgttaaaggctggaaaacaactccaatgtccatcagtgggggaatggttaaacaaagtatgagatagacatctatggaaatcag[145 bp omitted]gaaaccccgtctctactaaaaatacaaaattagctgggcgtagtggcgcatgcgtgtaatcccagctagtcgggaggctgagggaggagaaccacttggacccgggaggcagaggttgcagtgagccgagatggcaccattgctctccagccttgcagtgagctgagatcatgccattgtacgaacgaaactatgtctcaaaaaaaaaaaaaagaaaatttaacaaggaaaatgtgccaggatatatggttaggtgaaggttaaaaacaaaaaaaaaaaaaaagcaagcagagtattatagttccttttcaaaaaggaagacaagaccagcccctcctcttcctcctcctgcttcgcccattcaatgtgaagatgttgaggatgaagaccttgaggatgacccacttccacttaaagaatagtaattatatttttcttgtttataattgtcttaacattttattttctctagcttactttactgtaagaatacagtgtataatacacataaacatgcaaaatatgtgttcatgtcagtaaggcttctactcaacaagaggctattagtagttaagttctggggagttcaaagttatatgtcaattttggactatgggtgaggagggggcacccctagctcccatgttgttcaagggtcacctgtataatacacatctggttatttgcatatagaatattcctggaaactgataacattgtttgcttccaaggaaaggaactgtgtgggtgagggtcaggggtgagagattaccttgcaaattttatgtcacgatgtgtatcat[137 bp omitted]aaccccttctctactaaaaacacaaaaattagccaggcgtggtggcatgtgcctgtaatcccagctactcaggaggctgaggcaggagaatcgcttcaacccaagaagcagaggttgcagtgagccgagattgtgccattgcactccagcctgggtgacagagtgagactccccctcaaaaaaaaaaaaaaatctgggttgcacgtgtaaggctggccctagctaaggagcgtgaagtacagaaattttcaggtcatctcagccttttctgcccgagcacatctgcaatactgcctggcttttccccattgtgtggaggtggcttcaggccccagattcccacctctcctaggacgcgggctaatttgcttcctctgtgggagcaaggcctgagccttataagtctttaaccccttcttgcagcccaagcacctgctgaagtggaaaatgtcacacattaaaaaatgatgcagccctgaggttttgggcccaggacacaaactccaatgctaggcggggtgtgcaagccagtgaggtacccaggcgtcacagaaactgcagctgggacaggagggcggacagcgtcacagaaactgcagctgggataggagggcggacagcatctgctttgggcaggggtcagaggctgcagagatgcgtccaaggggcagatcctgctcagctctttgggcaggggccagaggctgcagagatgcgtccaaggggcagatcctgctcagctcttgccaagtgtcgtcaagcccttctgaggagtccagtgctgacggattatgtgatgactcgagggaagctgaaaatggggacttttatgcaaagtgtctccatttttaagtgttggcaattaattcaaggttaaaaacaataataataaacacaataacaccatgtaggcccaacaaactcttctgtcagcaaagtcaggcccatggacctcccgttgtgacctctggttcaggaagctcctgggtggctagaagtaaatctagcgcacaccccctccccagctgccagggcacagacctcagtcgcagtctggggagaagtccccaacaaaagaaggagcctcctcctcccagatccttacatgtggttaaggtgagggctgaggtccccaccaccctagagggaaacacaactcagcagaaggatcagaggcaggaatgacgtggacgaccctggagatgacagggctgcaccaaattctgccaaggataatcccttcttctctttctccttcccttcctcccctcctcccttcctctcctcctctcctcccctccctccttccctccctctttccctcttcccctccctccttccctcctgccctccctccctccctccctttcttttttagacagaatcttgctctgtcaccaggctggagtgcagtggcacgatctcggctcactgcaacctctgcttcactggctcaagtgattctcctgcctcagcctctcccgggtagctgggattacaggtgcatgtcaccacacctggctagtttttgtatttttagcagagacaggatttca[132 bp omitted]aagaatacaacattatctatgtaagattcctggccagggcatggtggctcacatctgtaatcccaagactttgggaagccaaggcgggcagatcacttgagctcaggagttcaagaccagcctgggcaacatagcacaaccttgtctctacaaaaaataaaaaacaaaactagccaggtatggtggcacacacttgtagtcccagctacttgggaggctgaagcaggaggatctcttgagcctgggaggttgaggctgcagtgagctatgattatatcactgcactttagcctaagttaaaaaaaaatcctgtcaaaaatatttaatctgaatctaatgataagtggggaaaatcaagatagttttttaaaaggcaccttgtggcagcgtgtggtggctcacgcctgtaatcctagcaatctgggaggcccaggtgtgcggatcacaaggtcagaagttggagaccagcctggccaacatagtgaaaccctgtctctactgaaaatacaaaaattagccgggcatggtggtgggcgcctgtaatcccagctactcgagaggctgaggcaggagaattgtttgaacccgggaggtggaggttgcagtgagccgagatcgcgccattgcactccagcctgggtgacagggcgagactgtgtctcaaaaaaaaaaaaggtgcacagcttcctgaactctaaaaaattagcactgtgatggattaaaaaaacaaaggctagatgaagatcagctgaggctggggagttttctcccaggcctcagcagcctcagtgagagaagggagggccagttcttgaggccagcagcagaaagccccaagccttggtttcgggccgagtccccaaggtgtgtccagagacaagtctccttccttcctgtgcctccacaacccactgccaagcaggcaatcatgaaaacaagggacgggtttcaaaagtgcacagattccttattttgtattccaattattcttatttcaacaaatcacagtcatcacagtccatctttatgttactgaataatgcagtccatgaaaatttcaatcaaatttaatgataaattaactatgacattaaagtaaattgagcattaagaatgatggaacgagtagagttgtgggtactcagaggcgggtctgaatgcttctggagtggcctgccctgcgggcatctctcccctttccatcgtctttcctcactcaaactgctcttggccttgccctcttgtcgggga[131 bp omitted]gagaaaccccatctctactaaaaatacaaaattagccaggcttggtggcgcatgcctataatcccagctacttgggaaggctgaggcaggagaatcgcttgaacctgggaggtggcggttgcggt[135 bp omitted]gggcaggcaggaggagaaatgggtcttggccagtcttgttccccccagaatcttcctgagttgacttaccctcagagtgaggatgccaccgtgcaccccagcaggcctgtgcagacagactgctagccggaagaggagacggtaccaaggacagccccttcaatgatgcatcctggctggctccaagccaaccacctaaaaggccatggaagtcctgaggaggactgagacccacctaagtaccactcagtccccttcttgtcccagagtcgaggatgaacatgcctcagagtcacctagaggacatgggttgctgggtcccaccccccactgtctgattcaggagctctggatggggtctgagctctcaagtgatgctgaaggtccagggaccacactttgagaaccagcattcgtgatccatttagcagggacagggacagcccctgggggagaccttgtgcccaccacaatggaagacacacagataaacaagccacagagccctgctcttaagatcctacatggcaagtgggcaaaggacatgaacagacactttttctttttttttttgagataaagttttgctcttgtcaccaaggttggagtgcaatggcatgatctcagctcactgcaacctccacctcccgggttcaagcgattctcctgcttcagcctcgcgagtagctgggattacaggtgcctgccaccatgcccggctaatttttgtatttttagtagagacagggtttcaccatgttggtcaggctggtctcgaactcctgaccttcaggtgatccacccaccttggcctcccaaagtgttgggattacaggcgtgagtcaccgcgcccggcccagacacttttcaaaagaagacatatgtgcagccaacaagcatatgcaaaaatgctcatcaccgctaatcattaaagaaaggcaaatcaaaaccacaatgagatatcatggcatgccaatcagaatggctataattaaaaaggtcaaaaaataacaggtgctggcaaggttgcagagaaaagggaacacttatacacagttggagggagcataaattagttcaaccatgtggaaagcaatgtggtgattcctcaaagaactaaaaacagaactatcattcgacccagcaatcccattactgggtatatacccaaaggaatataaatctttccacataaagacacatggacgcatatgttcattgcagcactattcacaatagcaaaaacatggaatcaacttaaatgcccatcaacgatatactagataaaggaaacgtggtacatatacaacatgaaatactatgcagctgtaacaaagaataagatcatgtcctttgcagggacatggatggagctggaagccattatccttagcaaacgaatgcaggaacagaaaacaggttggggcagaagagtaaaggcagtagaatgtgaggactcattaaggactcatcaccctgctgcttctgccactccttgaggataccagtcctcagatggagccccgaggtgcctgccactgtctctgtcctctctcattttgggatttctccctcccaggaagcccactgggatttctccaaatcctcactcctgcaggggagccctgactcaggcaccctctttagggctttgcatgtattctcatttcatcttcccagcaactccacaggggaggaagaacagcctcatcgtatatgaggaaactgaggatcacagaagcgaggtatccgaatccagatccagctgactgcagagctccagcctcgaccacgaagctatgtgatgggctatttgctcgttcactttccattcgaacatctgttgaaaggctgctcagtgccacgtgctacgctagctcttcccagcaagctgcatgcatacatttgtaatgatatttctcgtgatggtttatttaatgtttctcctccttgccagacagcctgttctacaaggggatggggaccatcttttccctgccatttccctcctgactggtgcagtgttgggtacatagtgggtgctcaggagatgtttcttggtgcagtggccggaggctaggaatgtaaggcatcatctctgctctcaacagttccgtaaataagtcactgtaattctttgggataaacctgccagtggagtaagcctgaggtgctgaggttactggaaggactgagggtccaggggaggaatcttagatttaggtaataatagtagggcccaggcagacagaggggtgggaaggtgagaagggtactgcaggaagggaaaggactcaggatgagaggatatgccctacaggtggggaccgcgttgctcggtttggctgagctgtgtcccactgcgtacccctcagagagcttctgggaggcagcccttgtgcttctggctgctcctgagtcagggagtagacaagactgagctgagagggggtcttgcaggggtgccaaggtctgtcctgaaggcagcaggacagcgggggccacagaagcaccctgcaggagagtaacaattaatcaggctgttgtctggggtgagcacccccactacagcatagaggatgcactggagggagaacgtgactgtggccatcagggcagtctgcagtgatgggggatggggggtggggggtggggggtcatgatagcagctgggagcagcatagtcaagaggggattagaagaagcctgggatactctacaggtagcccttgacagcaccatgaagtcaattcagtgatgcccatccagggacaatttttcccccaccccagaaacatctagcaacgtggagacatttttggttgtcacagctgtgtggggtcgagggtggatgctattagcctctggttggtaggggccagggaaggtgatacatatctacaatgcacgggacagctccccacaacaaagtgctatccaacccaaaagatcaatggtgctgaggctgagaaaccctgagttgactgacctgggtggagaggaagcatgtttccatccattgggatggaagatggaagaacagtcccttcggagagagggaggcagtggcagcagaggggcatggtgagaggtgtgtgcgcgcagatgtcctggaagcaactggagcctcgatgtttatttgcaatggtctagtgcaacctcatgcacagatgaggaaactgagacacagaatgtttaattctagttcactataagtggcagagcagggtccagaaccagcttcctaattcctgggccaccacttttatccttgctgtgtccttctgtgacatccagacctcaaagtcaaggctcctaggtccctggatcagaagggctgagagggccacacagctccaccctgcggtgctccaaagcccaaggagggaagagaaggtgggacaggactttccgcatgtggattcctgtcctccccccggttacattttcctgatggttaataccagggtccagctacacctctggaaagacctcatcctcctcccaaggcctcccaggcatagcaggagcttcactgccatcctaaagatccactttctgtttgttcaacaaaagcaaataatgtgccagccacagttctcagcgttttacacgtattagctcattgaatcctcacaacagccctgcaaggcaggtgctattattatccccattttacagataaggaaactgaggcacagagaggctaagtcacttatgcaagatcacacagtttgtgcatggaataggtggacccaggctctgaacccacgcaagccggcttcagtctaggctcttagcctctgtcacactacctttccaacacactgaggtataaatgtgccaggtccccaccaaaggcaggggctcaaaaaggaagggtgctcaagagggagccagagaggggcacgcctccccgtgtgtactgctcagggcaagttccagcaggcagtcccaccctcacttcccccgagaccagtgtcctcaacaaagccgcgtcttcgctcttgcaccaactctgttttctccaaccctcaggtaaatggagtgacacccccatcgctccccagctgctggggtccactgtgcagctggggttcctgcagggcttttccgcacaggagcagccagaagcacatgggctgcctcccagaagctctctgaggggtacgcagtgggacacagcagccagaaaaccacctggctgaggtgtgagagccactgaacacacgtgtgaccaagggggctgacatacggaggccccaaggcatgcccctcccctaagtcctggcccagcaggagcctgtggggaacagaggccacaggcttcttgcacggcctgtttgaccaccttgcctgcagcagagaagggaaaatggtttgacaactgagggttcaagtccaacaggctctgaattttctcccagaggaaagctgatctgggagggtatgggagaggaacaagccagccccggagctctgtggaacagagaagaagagtagacaggaccccaagggttcacctccagcccctaccccgggttctgtggctacgctgggaagccctgaagctgaggaccacaggtgtccccaaattcctctttccaggtgagagtgtggccgggtggctttgctgtcatcttttctgaaaccctctagattcagacgcgttcatgctcctgccaagggctgtgagctgccatgagcacccgtcactcccaatcaaacagcacactccacctgccagccccacaccagggacagcggaaacaagacccagcaaggctgccagcccctgcccgttgctgtcagggggcccatgtgtctgtcccctgaaaacccatagcctggggaaaaaggagcgtcagaatccagctccattctttctctggatccaccaccctttgctgcccaggcctggaaatttctgctctgcgggatcagacagcacgggaagcggctcacctcatccctacacaccacagaaaaggaagttcacgccccagcctcctgagacctgagccatccctttcgccctgagcatctccttcttgggaaaccatgaactctggaggatcagaacccagaggaagaggctgggcatgggagagcggtgttgtgtggaagggaaaaggcaccaaggcctggagacctgtgggccaaggccaggtggtacaccgggaagtgtcctgggccagcagccaggagacctgggttcaagtcctgggctctgctcctcacttgttttgtgacctctggccagtcgctcctttgctcagtttctctggcaaaaaaattctccaaggcatgagtgtttacttaaaacctctggggaacactggctcaaatgcagattttccagtctggccccagagaaaacaactgaaggtctggggtgccatccaggaatctgcattttaaaaaaggtcttggaggcttgagaatacaatttgcagactccctcatgagaagcaatgatatggctcagcaggaagcgacagggaaggcagggatgggcgaggtgtgctgcccatcaggggcccaacaagggccgccatcagccccctccggccacacccgaagccctggctgtaagatggactccagcaggtgccccaccctgtggcctgggcaccatcactaagcgcctttaaggcaaccctccacgacataacactctgcttttcactttgcatttttgtttttcttctagaattcaaatatgtctcccactccgacctccccccctttctcctccccctcctttttatgtatttcagaagactctggagagctcctgctgtgccccagcattctggggcattttgtgacaatttgaagatggggactgtaccctctggaactctgcacctgagcctgcccacaccccctacccaccagctccatcaactccaccggtaacagggaggctgctgctaccccacagtccaagcaggctgagtcgttctgcccagcccttggagacaccgtccatcagcacagggcactccaaaggagctcatgacacaaggaacccaagccagctccagaaggggcactgtggtaaggacatagatttcaaatcctgatacttcccagctgggtgaccgtgagcaaggtgcggctctgtgcctcagtttcctcatctgtaaacagggtgatgagtgtgcacagagcacttactatatgcaggctctgttctaagtgctttccatggatggacccatttagtccctacaccatccctaaggcagagaccacccactaccccccatttccccacttgacagttattgactgagacgggaagaagtcaagaaacttgccccaggctgttgcactgtcattaatataaccgacactctggcctcagagtccacgttcatcatcgttatactatattgattccacgactgacacttcatatagctaatggacaattaaatgagccacttggatcactacatgtgcataataagtgcacacaaaagttgcagcaattgttattgttaattgtttacctacactttttctcccaaagcaggatgtgcagcctggacgaagcagggaaatgcacccactcttggttttgtctccacaggggtggtcggaatggctcagagctgtgtgagttggagcctaagagagcaataccccgttccctgctctcctgcccttgtgccaaaatagcaaacctgcgaccacacttctcaggcctgtgcccctcagggggcaatgatgtccagccccagctgccccaaacacagggctgaggagcagaggtggagtgtggggctccccttcatctctgcatgggggtgggtggggtgggctccccctcatctccacatggggttgggcatctcgaagcgccctgggaggcaggctggccactctaggcagaagctgcctgctcccctcagggactcctaggaactctattcttaggacgctttctcttgctttttactttgacatcttccagaagttaccccgcacaaaagcaaccctgccgtggctgtaatttacacgtcacatcacttgcgctgagcacagtccacccccttcaacccactcccgcacgcataccttcccctcctgccctgaaaaaacggcttctgcatcatcccagccatcctccttccacttgttcaccaggagagaagtgaaatgtgaaattgacaggagaaggggaggtgggaggggcatgtggatggggaacttgagtgaaatccgagctttggaacttccccgtttccaggttgggcatcacttctgcttggcggtccacatcgccatggcaacagcccagccaaatgccccagctcgcagcccaccctgagggcgcccctcgggagccacttactgtgatggtgttttccttgctctgctttttgcttggcgatgaggatcccaggttctggggagagaggcaagaaacatcgtcaaagctgttctccatattggacattttttccccccattcaggttccctgagggtggaggcgctggggaatcagggatgctcagtctgaatcctaagtcaccatattctgggccagggcaagcaggggtctccctgaccccacgctgttcccacgcccagctctcgggctgaaggcgaattaaggaagcctcctgcacaggctctgagagaactgctccaaaccaggtctcccctcctcttctctcagtctgtgatttggggagttaacccctccgctgccctctgctggtgaacgttccgcgtgccgcttgctgcctgaagccgcggaatccactggggagaagagagttaaggccaccacctcctggcactgaggaatcagcacacgacattttattctgaaaccccccgggtccaaaacgtcaaacctaaatacacacaatgtgcactggggcgctgctcggtcacctccctgactccccgctcccccaaccccgtgagccaggagggatttctcagccaaaccgacttccagcttccactcagtctttatattgccttttgatgtcttccaccgccagtaagaaaaccagagtcccaagtacctctgagcctggggtcctcagcagtttgccaaagtcctgggatcgttctggcagagaaaattaaggactgccagtgcaaaatgctacacgtgtcctaagagcctacgactccaaagaatgtttgattctgggtctctgttgttctattagcaattatgttgggggctcaataccagagatccccaagcaggacctgggatgtctcctatcctgagccacacagcaacctgggaagcaggcttacccctaaggcaccgcaggtggccatcacacttgtgccccaggacttgtgcatgaccttattctttttttttttttttaagatggagtgtcattctgtcacccaggttggagtgcagtggcgtgatcatggctcacagcaacctctgcctcccaggttcaagcaattctcctgcctcagcctcctgagtagctgggattacaggtgcccgccagcacgcccagctaatttttgtatttttagtagagacagggtttcaccatgttggccaggctggtctcgaacttttgacctcaggcgatccacctgtctcggcctcccaaagtgctgggattataggcatgagccactgcggccagtctggccttactcttccttggtagaatgtaaggaagtggctgtcactttatagataaaggccagaaaaaggatggaggggcttcaacaagaaggaaccaccggcttggagtggggggcaccccgcccctcaggccagcacgaccctggacacctggccaaatgaccatctgcaggtgagggcgagcctttgcctcagaaacccgtcagcaaattaggcaaaccagggagcttgactatgcccctgctaaggtcgcatacccttactcccatacagtcttacttgggttgctaattaaagtcaactcaggaaaactgatatccttaaggtgtctagcaaaaatgaaccttacagagcattaatttcacagacaagaaaatgattactagccttgagaccctggccagagaatctgacttctttgagcctcaatttctccatctgtcaaatggatggttatcactggtcctcaagctttgaggtgcatcagaatcaactgaggaaaaagtgtccaaaatagagtcccagctgcactctcagctgctgggcctgatccagcaggtcccaggtggtgccagcacctctgatttgcagaatctgtggacctcactcagagatacatggatctgatctacactgtggtttcactgaggtacctctacttatggcaactcctctagtgaccccaacgggctcctggccaacgtcaactttatggccaactacagcttccatagacatttttagtgcatcatctcatccagctggcccaccctataccttcccacttgacaaaactgcacagggagaaaggcagacggaggctacatggcaggaggtaccagtcaccaaggagaagagacagggatagaagtctctctctccataggttcattcacgtacagactctagccaagcaaatacatggcaggaaggggaaagagtagcctatgggatggattctgcagtctgcaggagtctgtcttcctgtcatggacacattaccaccatcaccaccgcgttcccactgcagccccccagagaggggaaccagcactccagcagccttggcaacagccttcgagtctgcctatggatgctgatgatgttggtgatgagggggctaaggggagaagcagtgcaagagcgactgtctactgagtgcttgcttattacggcaggctccaggttagccatctgacatatttaatctcatttcatccttacaaccccagcaagttaaatggcatcaactccattttgcagatcatgaaattggggcttgcagaagtaaaactgtccagggtcacaaggctatagtaaacagaggagtggaaattagaatccaagcctgcataactctttcctctatcttccgccatctctccactttgagacctgagacaatattttgttttccatgtgtctttgcaggaaggcaaaaaagatttccatcaaccacaaacatatattttgggaccactgtgtataaatctctgtagaataaggcttgacgcagaggtcgcacctcctccttataacttggctaggataggaatacaagtaatggcattgaggttgggtgttccacgtgttaggtgtcagcaccttccctggtctctgttctattagcagtgttttacttcaaccactgagggccaaggtagatcacaggcaatctcaggctctgcctgtgctgctgataacctgtgcctactgctccaacttcatatacatatcacgtgcattttatacacacacacacacacacacacacacacgtgacacacacactatcataattctccattgaaagggcccagaaggaatgacatctcatcacagtgacaacatctactggctagaaattggtttccaaatattaccggaagctccttggtactaatttcaaaggcaggtatttggaatatcctattgtaccaagaggtaagaaagtattcagagaataatggagagataacaaaagaacataaacaacttaaagggctaccacaggccaaatctgcgacaatttgagcacaaatatgaatgaatgactgcaactaactaactaactccaaaggggaagggagagaacatttatttcagaagaatgccaataaaaaatgtacaagaaattggatgaccaccatttgcaaaccccagcctcaaaggggactcaggccatgatcctcaaggatgctgaaagcaggggatggaaagactgccagggcacaggatactcacagggtcttacactggcacctcacagatgactgacaaattagaaagggaaaatgtacccctgcaaaggagaaatctggcagtcagcaccttaaccgagagtgcaaactgagcctcatgagtagggtgccaacctgggtggttgtgcccccaaatgcagtaaaaagaaccccacatgccctgtccagctattcttgcccaaactccagaacctgaacctacgcataagagaacagtcagaccaagaacgcaggttattctataagacacctgacctggactcctcaaaaataaatcgtcaaggtgatgaaaaaaaaaaaaaagaaaaaaaggtgtaagggattgagtgtagaggcaacgagacaggcaacaacttggatgaaacgttctatccatacgacagaatattcttctgtcataaaaaggaatggagtgttcatccatgccgcgatgtgaatgaaccttggaattccaggtgaaagaggccagacacaaaagaccacagatagtatgataccatttatatgaaatgtccagaagaggcaaacccatagagacagaaagattaggggctgcctaagtcttcaggtgattctgcttgggttgatgaaaatgttctaaaatagatttgatgatggttgtaaaactttgtaaatatagtaaaaaacactgaattgtatacactttaaatgggtgaattgtatgggtatgtgaattacagctcaataaagcagttttttggtgggggaagagagagagagagagaaacaacagagacacagcaaccagtgtatctgtgtgtgaacctgaagggatcctggactggggagaaaagcagccataaaagggatttgggggccaggtatggtggcgcacacctgtaaccctaggctttgagaggttgaggtggaaggatcgcttgagcccaggagttctagaattcacgagctataatggtgtcactgtactgtagcctgaggtacagaacaagaccccatctctctcttttttctttcttaaaaaaaggcattttttgagacaattgaggaatctggagtgtatatattaggcggcattattgaattaatgttttcttaaatatgataatggtattatcattatgtcttcttcctggaagatacattctgaaatatttgcatttaaaacagtaagtcagaaatgtggtttaaaataatctagggggtggagggcaaggggattgggggaggggatgggagcacaaataaaacaagattggacaaaggcaggtaatcgttgggcttaacagatttgtggtaccttattatatattccctctacttttgcaaaggtttgcaaatgcctataataagagtatttgttttaaatttcctttgcctgtgattccagagaactcttcccttccatttattttgtaaaggcctgcccaggggtcaggacaccccacctgggcatctctgcatcaccctgaggcctggcagggggtgataccacacaggaagtgcttggtaaactggagtgggtcattcacaagtgattcagcaggcccccgactccaaatgtcttctcagcccatttcctccccccctgcaaataatctgggtcccatcccttcagcaggtgggatcctgtacaaaacccctcaatggcttcccagtgcagttaggataacccctgagctcctcgtggcaggcctgcgcagactaccccagcctcatttcccaccctccctattcctgctgatttagtaagccacagccacactgggtctctatgcgtaaacacggttcccccttgctgcctccaggcatccacgatgctattccctcccctggaaagctattctttccccacctctttgccaagtgaaacccttgctcatcattccagtcttagaataggtatcttttcttaaggtaccttaattcctgacatttccagcaccaggctaggttctcacagcatccacttcctccagcctttgtcactgctgaaattgcaccattatttatctactgtttctcccacaccagccataaaactccatcaacgcagggctatagatatcacctgtgtctcagtgcctgacaaagaccgaaattgctcaataagaacatgtgttattgaattattgaggtaggtaggaggtggtggagattaaacatctcacctctttctccactttgaactccatgctccaatgggtccctcaagtttccaagcccttcgtcccattctctttcctctctcctgtgtctagagggtcttcctgggaagttcgtgagaagccagaacaattgaaaggtggatcacaaaaaggcccaggcactggtgggcaggaagggaagggacccactaggacgcgattctgcaaaggcagcaagactattagcctttgatctagaaccggaaataccatttgacccagcaatcctattactgagtatacccaaaggaatataagtcattctactataaagacacatgcacacgtgtttattgctacactatttacaacagcaaagacttggaaccaacccaaatgcccatcaatgatagactaaagaaaatgtggcatatatacataatggaatagtatgcagccataaaaaagaatgagttcatgtcctttgtagggacatggatgaagctggaggccatcattctcagcaaacacaggaacagaaaactaaacaccgcatgttctcactcataagtgggagatgaacaatgggaccatatggacaccggtgggggaacatcacacaccaggacctatcggggcgtgggggataagaggagggagagcattaggacaaatacctactgcacgcagggcttaaaatctagatgacaggttgataggtgcaacaaaccaccatggcacatgtgtacctatgtaacaaacctgcacgttctccacatgtatcccagaacttaaagtaaaataaaaaataaaaaaagatgattcgcctttgatccctcgcctctgcccccgaatcaggtgggctgcatttacccagtacctgggccgactgccccagggctgcagaattgaaaccctccactgggtggcaccagatcaccacctcctgtgcccacccatccaggtctccaagggctgagtgaaggagcggggcaggcaccctcaggaactgtggggcacccactatcagtcctccccatgacatagtatggtggggacacgttactggtgtccgtggaaagtccctttccccatc[136 bp omitted]ctgcctcagcctcccgagtagctgggactacaggtgcccgccac[175 bp omitted]agcttgctcaaggaggggcagctaagcagggggcggaaagagatcacaaccgggttttgagatctggggctttccagtctaggtttcgtcactgtaaccctgaacatgccactttatccaccccacatgccgcatctcaagtgttcctttgctcatttattcatttattgatgtttaagtgtagttatcatgagtgataactgacagcagggatggtgaatctactcgtctgcatgctggagtggggtctatacctggggaccctttgttggtagagctctctgtaaacaccaaaccttcttaacctatttgtatgtttaactcttggcacctttttggataaccagcctgcaggctcacaaaccaggacaaaaagtagtagctagctgggcgtggtggccggcgcctgcagtcccagctactccagaggctgaggcgggaggattgtttgagcccagcagttccaagctgaggtcacagtgatctacgatcacctccatgaacagccagtgcattccagcaagggcaacacagggacaccctgtttcctaattatttttaacttaaaaaagtagtagcttttatatacaaatgttaccctttcaaagcctaaaagaataacattctacctcctgatcctgggactggtgaacaacgcacgttcgccctctccatatactacatgatttatttttgttaccctgatgacacctcagctcccaaggttaccatccaaaaagagtctgactcaatccgcctgtctttaggcagccactatctacccgggcctgcatctccagagctcgcctctcctgaattccccatactggtacctactttgtagcttttttttttttttttaagtaaaaaattgtatctgccttctataaaagtaaaatgtgttcattttaggaaatttgaaaaataacaacaagtgtaaagaaaataaaatgacccatgatcttagaccaaaggttctcaacttcagcacgattcatgttttcaagttgagcacttctttgctgtggtgtcccatgccttgcgagatactcagcgtcatccctggtgtcacctactagttgccagtagcaccccccctccccaggcgtgacaatccaaacgtctccagacattgtcaaaagtcccaattgatagccatgatctcagacgcagacagagccaccgtacgttttccagttttccttctagtccttcttcctaagtatagataagtatagatttccttctgccaaataagactgactatatatgcaatgtgtgtcctactttttttttactctattttatgttgtgagtactttcccaaattattgcattttcttcagaagcatgcttgctaatggctgcatagtatcactggctaacctccagcgccatcatcccttttacccatcccctgttgcaggacagttaggctgggtctagtgttatggtgctgtaaataatgtgtgagtgaatagccttgcacataaatcagaacccctcaagataccccaagaacagacactagacaagacatccctgtgtcgatggcttataatgcacagtgttaaatcagcttctgagatatcagttataccagtgtccattctttaaaatagatgagtaacaacttcacagtatttcagaagggattatgttttatcagggaagaaagaatgattttgaggatggggagctgtttctcatattcttcctgatgatgcccagggtaacaccagatttctgtcatcgttgctgaaccacatcagaatttaggctgatgtcttccaaaacagtctcaaatcaggagacaaaagtaagtttcacttcaaacaggataacagaatctgtgttgagaaggcaagctgggagctcagcaggaaacatacaaagccacggttgattcatgatgggtgacatgagcagaggagagaaggagaccgataggccagctgtgtgctactgactgctagtccactgctcaggagtggtcctcagacctacagcatcagcgtcacctcggagctggctggaaacccagaacctcagcccccaccctagatctcctggattagaatctgcattttaacaagaggcccagctcactctaagtccatcaaaacataagaagtcctgacatacactgaggttcaaattcttttccagagttaactgaactgaatcgaagcccaacactcagcatcctaacagaacgacttaataacgttcccccaaattaacactcttgtccatgataaagctgagtgtcacatttcagctgattatactaacagccaatgggtctccagatgttgccaaatgtcccttgattaagaaccacggtctcagatgcagacagaaccataatcaatcctccggtttatttttcttccagtcattttttccttatgttaagtatagatttccttcttccagtgactggtacatagaatccactgcacacgcagctactgtcatcatcaacatcatcaatattatcatcatgatcatcatcaatgatcattattgtcatcattttcattatcacctccaggattctggcattttaattcctggaaaaggctgctggagtttggaagcttcattaagaacatcttcttgataatttatgggtagactaaataaggctagtcctcagttttttaggcacagcttcacgcaactagaaaagccgtaagcactgacatcaaggtccagtctaaccactgagtaatcctgtgagcctgcacaggtcacaaaaccagttggagcctcggtgacctcatgcataccttgagttgttactgacgcctaactcacatgtttgcataaacatcaagtaggatggagactgagaaaacagtttggaaatcgtacaacatactcccatttccttccatctcatagctctctctatgctactttatcaaatgagatgatcaaattttactaaattccattctgggtaatctgtccgtgggaggggtagggtagagaaaaggaaaattgtctggcacatccatactcttaaagtggtgagaaacacaggcttcaggtatcaggaatccagaccagagaatggaactctctgtcctaatggtttcaaccccatcaccgtcaacccctcctccaaaccaccctcgacttctagaaaaccaacagaccacaatcatccaaccctctccccatcagggaacactgaaacaacccagacacagcaaccactttctacctgggggcagaactgggctgcagccacctggactcccatgatggactttgtaatgcagtttcctaggcctgcagaagcagtgaccgctatacctccctcaacaggaccccttacctgggaatcaccggtggattttcggacactcatgtgggcagtctctggagggtgcgctggggtccctgatgcgtggtatccattcactgcagggacagagacacggctcagatgctgtgtgggccacagatgggcacccccgcctttcgtccactgcagccccttttcccacctccttccttggctctgagaggtcttgcgtggcgaagaccatccctcaggatctgatcttatctgtatctgcagagctggaaatgggttgaaggcatctctctaatcctcagcacccaaattactgaattcttaggggactgagtttcttttttaacccgagagcaaaaggaatgtgcctaacaggaggggaggtcactatggtccagctgcctttgctacaaataccacatcagttgtagttacaaatgccagtcacgggtccaatctccctccgtagagtcggggcggggggctctccaccaccttccaacaatttccctcagctttcttagtaacttctccaccctcaaactcagagcagcggagtgtgaatatactagaaagaggactggattgactggtcaccgtgaaattaggctctgtcaattaatagtcaggtgatcatatgcacttcattcttgagtcaccgttctcctagaattaaaaatacataatctggcttggagctggggctcatgtctgtaatcccagaactttgtgaggccgaggtgggcggatcatgtgaggtcaggagtttgagaccagcctagccaacatggtgaaaccctgtctctactaaaaatacaaaaaaattagccaggcgtggtggcaggcacctgtaatcccagctactcgggaggctgaggcaggaggatcgcttgaacccaggaggcagaggttgcagtgagctgagattgcaccactgcactccagcctgggcaacaagagcaaaactccatcaaaaaacaaaacaaaacaaaacaaaaaaaacacattatctgaggctctaaaattctacccttataactttatgtctcttgggggacactcactcatgctcccaacacttgctgataaacctgctctccaaggaacagggggagccctgatatgtagtatctgtcgatttctgtgccaaagacactcccagcatggacggtttcaagccccaacgccgctacacgcacgctcctgacatcacgaattcacactgggacccacgtgatctcggttcccaggtggtaccgctcttgtagaaatataactacataagcttagacgagcagcttcgcctcagtgaccctcagcttctgtacctgtaaaatggggataattctacgtattctcctgacctactttgttggtgtgagaatccaacaaagcgataatagcaaaagttataagtagtcataaagcacttcatttaaaaaagggaaggatgaaaggcagggtgcggtagctcacgcctataatcccagtacttcgtgaggtggaggtgggaggatcgcttgagtccaggagttccagaccagcctgggcaacatagtgagaccccatctctatttttaaaaatagaaaaaatttaaaaaaaattaaaaagggaggaatggccagggggcagtggctcatgcctgttatcccagcactttgggaggcagagggaggactgcttgagcctaggagtttaagatcagcccggacaacaccgtgagacctcatctctacaaaatatatatatttttaaattagctgggtgtggtggctcatgtctgtagttccagtaactcgggaggctgaggtgggaggatagcttgagcctggcaggtggaggctgcagtgaactgtgattgtaccactacactccagcccacacttcagagtgtgacaccctgtatcaaaaaagtgggggagcagaggcatccagaaggggaaggtctttgcttttgttcctgaattgagtccccaggaaccacaagcctgcgtgatctcaggagaccaggacgatgcgccatcccgtgacccaggcttcaagtaattgccaataaatatatacaatgcaggtcagactggaggaagatctacacactgatgtccaactcatgattcttctagagaaaactctatagcgtggcaggaagcacaggagaatatggctgaaagttaccaccaacacctactcatttggagcgacgaggactggaggcaagcgttgggcaatgggatgatgaagcccgttccacggagaacccgtctcctgctcaggtggtgccccgttctccaccacttgcagtgaacactccagggccaagcagggccacatgcagctgagtgcctgtgcgcagctgggcttctcccccagctacagggtttaccccccgttccagaataaggtggttgcacacatcccaaggaaatagcaagctgatccacagcaggcccctagtacagtagaagcttgagggaagcaacaagaaacaacaaatccaccctgcagggccagctacaagcctgggccacacccacatccctcaggcagctggccaagtgcagataccatccacccgctatgaaggcagcttaagaggcaaggacaggattccaacagcatcagggaaaatgctgagggggccaaggagaatccactctgactggcatcaagctatgccaggaaagacatgagcctgatgataaatacaccctacaacgagggcatgagagtggagaaattttatcaaatagcatagaactatctgaataaaacacagatgctgaaaaacctaaagacaacagaagaaaacctcaggacactgctttcagtttaggactgattaacagacaaaaacaaggaggataaagaagacccgaataatttaatttaaaaggctgattgaaatagatgtagtaaacatcatatcctacaaacaaagataacatcttctgccaggaagccctggaacatgtaaaaacttggtcacatttaagccacaaataaactatcaataaatggcaaaaggtataaaaaacacaggccacattctttgaccaggaaagcaataaaagtagatattaataatgaaagaataaatatacaagatccccatccccccaactcctaaacacttagaaatgtaagaaactgccctcttaaataatgccagatcaaaaaggaatttaaaactgtaattacacaatatttagaaaataataaagaagaatatatcaaaacaaatgggataaagtctgaagtatacctggaggaaaatccacagccttaattatttcattaccaaacccaaaggaacaaaaataaatggactaaacattcaacttaagatctggggaaaaaattttaaaggccaataacatacgccaaaagaaaacaggagaacggaatagaaaagtggtaacagaaattaacgagtcaggaaacgggagaccattagcaaaccatggctggttctgtgtgtgtgcatcacaacaataaaaacagcagataagccagggtaatttgagagggaaagagaacacaaatgctcagaattagggattagaaagaaaacaatggcacaacaaatatagtagaaacttttttttttttttttgagacggagtcttgcttcatcacccaggctggagtgcagtgggcgatctcggctcactgcgacctccgcctcccgggttcaagtgattctcctgcctcagcctcccgagtagctgggattacaggcgcccgccaccatgcccagctaatttgtgtatttttagtggagacggggtttcactatgttgaccaggctggtctcaaactcctgacctcaagtgatccgccagcctcagcctcccaaagtgctgggattaccggcatgagccaccgtgctgtacttatagtagaaactttttaaatgcaagaacatatgacttataattctgtatcttcaacaccaaaccttccatgagattcaaattatcaaaagggtttcaagagatgccaaaaagaagtgaaacctttgaaaaatgacctccccgcaaaaggcactgcacccagatggtttgatgggcaaattcattcacacactccagaaagacacatccatgcatagaaacatgtggcaggcttccaggtctattttacaaagtcaacatgaccctggtcttaaaatcaaacaatacacaagggaaccatgtttagtctgctttcgaaaatgaaatgcacaagtttttatctgagtaggtaataaatctctatctttgataatgctgagtccccatgaaccaaggttgtcccagctcctgaggagaccctgactccctccctccccagaccctccaaatgcatgcccaggtcctgcctctcctctgccccagtctttccccacacttgcagccgccaggaactgtctaaagaggagacattttgcccctaatccaatcccttgttcccacttcagttctggtctgtcagctgatggctaattactgctcatgtcaaaacaattacgaggaaagaaaacacagttttccattcgaccctttctccccacgtagcagctctcctcggacaccctgtctggctgcgttatcacttgaagtctcccgggcacattcagaatacgtctcagtggagatctagacagttatagcccacaagatcctggcaaccctcacccacggcattcctcattgctattccctgtcctgggggctcccggctcacccagggtcagccacaaaacaaatgaggcgagaagtgggtgcttctggggcctccagcctctgggggaagaaaaatgaaattggtcaaggatcgctcataaagggaacataattcagtctggagatacaaggaaaaaaaaaaagcaaatgtcacactcatctgtttttaagatttttaaaaagggaactaaaagctctatctagttagtaaccttagcagcttcaaatataaataatacacacaggcacccacacacttcatttcccttataggcagttaagcaacttgagagggcttaggaggtgtctaatgagaggaggggacagatatttgggtagaaaagaggagggaggtctgggtagggagaagtcaacagaaacagaaaagaaaggcgaatatgaaaagttatcgagaaaggccaagcaacaaagaagcgccagcagctccgccacccagggctcacccccacccacagctcggcttccatatctcagtaccgatccctgagggaaaaagtcgcatcctcagagccctactctccaggttcctgttccctgaggaacccaaaagaacataagaaaatcagccatgaacactctcttattatacctcctgtaggtctggcctaatttctcctctctctggaataaacatagtaatttcactcctcaaagttaggaaacctggtgactgggagcggtggctcacgcctgaaatcccagcactttgggaggctgaggagggcggatcacttgaggtcaggagctcgtgaccagcctgcctaacatggtgaaaccccatctctactaaaatacaaaaaattagccagggatggtggcgcacgcctgtaatcccagctgcttgggaggctgtggcaggagaattgcttgaacccgggaggtggaggctgcagtgagccaagatcctggcattgcactccagcctgggcaacaagtgcgaaactgtctccaaaacaaaccaaaaaaaacaaagttgaggaaccccggagtgctgaagccctggttcttgaaatcctcgcttccctcttttcctcttcccctctcttcttccctccctcccttcccttcgggcttctttttccttcctcccttccttctacccatcctccttccctccttctttctcacccccccctttttccttccttccacccgttctccttcctcatctatcacatattaaacatagtacagcctaatgtttccccaggtgtgttaaacaggatagcaattctgccagatgtgtattgtaagtgttatgcagtgatagtaaagggtcagtgttacggtccaaagaatttaggacaaacaccccattattcagattgagtttatttacagtaggccttttagaatatgctgacatgcgcttgaaatctcaaacaaggcaacagcatgcagcatccttccgcgcacacagacgcagaacccgttgagggaaatacagcagggctaccgtgaaatccactttgggacacacagtcatggccacagaatgcaaggtttgaagtggggcagttccgtgctcatccggtctgatgacatagggcacaattacagcctccttcctcccaccacatcctggaaggcctcgcaggttccttggtcaccatgctcaccttctcaggaggatccactgtccaccatggcccatttaggggagcagttttacataaatacctttctgttccagaaatttctctctggccacctggtcctcactgtctctcctagttgtctaagatgtgaactgcgttcccaaagacagactgataaaagattttcccacatggttgtgaatagtgaaacacctgtggctgctttccaggacatcagaggttaaacaggcctttgtaaggtcccaggagcctcagccagcaagaacactggttctaggggaacatgcacttcttccagcagaaggtgtcagggccttccctggagtcaggggtgaggtctaagtcagagtgctggggaagctgctttgaacctgagactggctaatttcgcaagaagcgagggtcttcctttgctcctgcaggggagaggagagctgtcccaggcttcctgatctggagaagaaggtgtgggcgagggtgaggctctgggttcaggagccccctccccagagagcccctgctcagaggaagcacagctgcctccctaaccatatccctggccggctcctcaggctcaaaggaaggtcctccttgcccttcagcctctgcaaaggcattcactctctcccctttaatctaggttccctgaggctactggaggcctaaggatgatccctcagtgggctgaagccccaaggctgagcaaagccagatcctgaacccatgtttcctgaaacactcccacaaccgcccaccaggacaacctcaaaaaataatagatttcttttatccttaagaaaaacacgtaagttcaatgcatatcccaggcccagaggctcagaaaggtattcactttccacatttgcactgttgacacaaaagccacagatgcctatttgaatttaaacaaatcaaatttaaataaaatctaaatgcaatatgatttccaggactggatccaagaacagaaaaaggacatgaatggaaaaactcatgacatctgaataaagtctaacattcagttactcgtaatgcacgatgtcaatttcatggttttgacaaatgtaccgtggttatgtaagatgtcaaccgggagaactgagtacagaaggcacaggaagttactgtctttatagcttttctgtaaattaaaaattgttccccaaattttaacaaggtattaaattaatgaaaaattcagctccttggacataccagccccattcaagtactcaagagccacacatggctagtggctaccatattggaaggcacagagaaagaatgcttatactgtcacagagggttctactggacaacactgccctgtactgtcttcattctacccaatgactcatacatgaaactcccagcatctcccttttcactcattttctttctctttgcctgttactatttctctctacaaatcagtatttccacactgcacgttaagcccagcccaaagaggactttcaatatttgcagcagttactgaatggcgtcttaggtgttctgttttggtttaaagtttatttcttactcatgcgggtctcacccagaaagcctggcattaaacacctctagtaaagctactgaataaacacagcttccataactctggtgatattaaaggatggaatgcaggcaaagtccccagcccaggtctgatcctaagtagcacccaacattcaaagactggagtctagtttgtgcgggggtggggaaggggggggttgggggaggactctaggcatgtttctagaactctcttcccagttggcaacctggctgcctctgcttaccagtatccaacaaacctgcactaataagaatgaaccagctctgtgggtggcccttcaaactctctctagaagttaacaaagctacaacacaaaagtaaagctggctgggcatggcggctcatgcctgtaaccccagcactttgggaggctgaggctggaggatcactggattctgagtttgaaaccagcctgggcaatatagtgggatcttgtctctatgaaaaattctttaaaaattagctgggcaaggtggcatgtgcctatagtcccaattaatcgggaggctgaggtgagagaatccctcgagcccaggaggtcaaggctgcagtgagccatgatcacaccactgcactccagcctgggcaacagagcaagaccccacctcaaacaaacaaaataatccaaaagcatgcatggatgggcagggcctcgttttatctctctccaggccctcaagtttatgaatggggaaaatgaggcctggcaaggagaaacatgcccaaggccccagtttaacatttgtaatttcacaaatctaggatgccagtgattgaggccagcagtggctcatgtctgtaatttgggtaattttgggaggatcacttgagaccaggagttcaaaaccagtctgagcaatatggcaaaacactgtttctacagaaaaaaataataataagaagaagaaaataaaataagaaaattagcggggtgtggtggcacacgcctgtagttccagctacttgagaggctgaggcaggaggactgcttgagccctggaggaggaggctgcagtgagctatgatcatgacactgtattccagcctgagtaacagagcaagaccatgtctctaataaactagtatatactattgattgtaagatgcatctgacttccaagatattaatatgtcaggggaaaatgtatgtctcagaatcaatgacacaggactcttcatgctgacgtagggagctgctgcttcttgcttcaatgggccatggtctgggaacccttgagcagcgctgaactgaggctctgggtcactctagaactgagcttccccacctcggcactagtaaacatttagggccaggtgattctttgttgtgaagacttgcctgtgcattgtgggatgttcagcagcagccctggcctctacccactaaatgcctgtagcccctccccccggtgctggcagtcaaaaatatctccagacattgccgaatgtcccctggtaggcaaaaccacccaaaagagggaggaaagcttaacacatatgtggtatgtttcaaacaaagaaacaaagcacaaacgaactgagttaaataggtttcttcatttcaggccttcctgcagtcttcagaatgctaatgtgcctgtccttcttcatcctccttcatggagcacggatacatctgggatcccaaggattccaccttaggaaatactaccccagcaccctggggatgggggcagagggggacaggagttgtcaacacactcagtctagccttggccatgcgggcaattctcatctctatatctgaccttctccacccatctccccacctttctcagccccctttaggggcccagcacacagtgcagcgctggacagagagaggctcttgatgcacctgtagggtaaagaagggagcctgttaaacccaggcctctaagccagggaccggaggcagctcctgtgagcatcccttctgcaggacagcccccatcaacagcagagaggacaagatgctgcctgtggagggtcccaggagagcaggctttggagaagtgaccccatgactcaaagggcaagtctcgaccagcctcaccaacggggcaggctgcgagtcacacgtgctgtctctacacatccgagcctccctctgccggcctccctgtcctgtcctccttcaccgaccactctggctggaaaagacagctgggttacctttttagtgtctggctggcctggagccagccaggaaaaaggacacaccttgcgtcattcgcactggcattttgattgttttaaaaaaaaaaaaaaacacaagaacaacattgaaagagaagccagtgggctcagaactgcctgctgtcacacggcagctacagtacgaacgggcccatttctggggacttggtctgagatggcagcactcactgtctccctaggaaatccgtcacagctgccccatgtccctcccacacagggggttcctttcttatttttttaaaaatttaataatataaatataaataaagtgcttttgaaaacctaaaataatttttgatagaaaacacccaccttcctatcacctctcccacgcctcagctgattttctagaggtaatattttcccatcttttccagttttgagctcttctgctggcaactgtcatatgcctaagcaatatgctttgaatgtgcactttcatgtcttcaggtctcaatgctagacaatatccaaagactccctgctctgaaaggtgaggatctggccactcgctttgcgtcccacctccctcttccgatccagtattccagagtcctgtgattacctttggtccttcctgtggttccctgtgctgcttcaggtaaactatttagaccagggattactttttcttctgaaaactttacacaggctctcacctcccttccacagaagctgaggatgtcacgctcaaggcattggaagattaaattcccagccccaaccacaactttgactttcatgctttgctgccagattgactcctgaagtcgaaaaccaacaagtgtgctccacacaccataggatggtggagacattggtgaattagttcaacacggaagccaggctctgcggactgaggatatcacaaaagaaacagacaaagtccccaccctcagggagcttacagtctagcatgggagagtgaaggtcaactaggaacaggatgatggggacattaaaatagcatgcggctgagatctaaagtgactgcatgagggctcaaaattgagtggtcagggaaggcttcttggaggaggtgacatttttaaaaagccacatgaaaggagatgttgttctccctgctgatgggtcccataacctgccttccagaatctcagacctagatgtctcccaagaggcccctgaacaaacctcccacctattataggaatgtccatttcagccaggcgcggtggctcacacctttaatcccagcactttgagaggccaaaacaggtggatcacttgagaccaggagctcaagaccagcctggccaacatggcgaaatcccgtctctactaaaaatacacaaattagccgggtgtggtggtgcgcacctgcaatcgcagctactcgggaggctggggaacaagaatccattgaacccagaaggggaggttgcagtgagccgagactgcaccactgcactccagcctgggtgacagaatgagaccctgtctcaaaagagaaacaaacaaacaaacaaaaaagaacgtccatctcaactgcctctgcttgattacctttgcagatggggaactcacaccctcaaaaggtctccctcacactgtttcaggtgttttatttgaaagctgccttgtaaacatctacctccttttagcttctactccgtgatgtccacaagagccacatagggtggttctgtccacacttcaggtcttcctgcccctgacagacaggaaagagctctgacacctcacctcccccagccatctcctcccactaagcgcctgaggaggagtgtgcaggaggccaccagagctgctgctggcactgccagggagacaccaacctgcttggcagcaggcctaagggaccctctcccaggcccaacccctccctgggtttgctacatcagccaggtttaagacccaggacccatcatctcagcctctccactgaatgtggcatcagggccctcccagttgccccaaagcagacagcggacattacctgttggaggcagagagctcctgtgagagccagggctggctggaatcccaggagaactgctgggacgttcccaggtggtctctggtgaaagaagagcaaagaaaatcactttgagaatgtcacagggcagaacctgagtttcacagagcagaaggagatgctcagagctggagaaaaagagagacagccaatcgccctcctccccaaccctggccagacaggaccctgctttctgctcccatatccatccatctcccttcctggcccctgcccccttccaccatcccatgaccacagagcttgtttttgctgggggcccttcttgatgaggctggggccagaaggagatggacttcctgttgagatgtcaagatcctctaaaatatcctctgccccaacctgcctcttcattcacccctactttgtctcggggctctggactcttctcctggaaccctgaagttgccaaccaggtatttctccccaaatgtccactgttacctgaaactccaaagcacagaggtgcaggagcctgtaaagagacaggggccctctgccacctggtggtgacttccaagtttcttcctgatttcgcagttctaagtctcatttgagctgtaactgctgaatttgcctggtcacctctctctcttccaatgccctgctacaggctctaatcagaaataaaactggccgggcacagtggctcacaactgtaatcccagcactttgggaggcctaggtgggcagatcacttgaggtcaggagttcgagaccggcctggccaacatggtgaaaccctgtctctactaaaaacacaaaaattagccaggcgtggtggcacgtgcctgtgatcccagctactcaggaggctgaggcaggagaacccttgaacctgggaggcagaggttgcagtgagccgagattgtgccactgcactccagcctgggagacagaatgagactctgcctcaaaaaaaaagaaagaaagaaaggaaagaaaggaaagaaaggaaagaaaggaaagaaagaaagaaagaaagaaagaaagaaagaaagaaagaaagcaaagaaagcaaagaaagagagaaaactaatactgcaagctatagtattgtcccccaaacactactttacccatttcactgccatgagcagagacttcttatgaagttatctagtgataaaaataatactttctcactacatacaatttgataatgcaggaaaacacacaaaaataaatatcacccatcatcccaccattcagaggtcatcaccatcaacattttggtatccatatgttgatttgttttctaagcatatgtttctctttaaaatgagacaaaatcaaactatagattctttttatgtataaatttttgtgaatacctttccaaaatctgtccaggcacagtggttcatgcgtcttatctcaatacttttgggaggctgaggtgggtgaattgcttaaactcaggagtttgagaccagcctgggcaagatggtgaaaccccatctccaccaaaaatacaaaaattagccaggtgtggtagcacgtgcctgtggtcccagctactcaggaggctgagctgggaggattactggagcctgggaagtcgaggctgcagtgagccatgatggcgccactacactccagcctgggtgacagagcaagaccctgtctcaaaaaatgaaaataggccgggcgcggtggctcatgtctgtaatcccagcaatttgggaggccgaggcgggtggatcacttgaggtcaggggttcgagaccaccctgaccaacatggtgaaacccgatctccactaaaaataacaaaaattagctgggcgcgatggtgtgtgcctgtaatccagctactcaggaggctgaagcacgagaatcgcttggtcctgggaggtggaggttgcagtgagctgagaccatgccactgcactccagcctgggtgacagagtgagactccatctcaaaaataaataaacaaataaaataaaaataaattttaaaaactttccaaaatcactgaagggggcggtatagcaaagtagttaggctctgtttagtgtggtgattctagacccagactgcctgggttggaatccagctctgcctctcaccaccactatccttggccaagctacttattctctgtgactccctttcctcctatgtaaaatgagttcaataaggtgtccacccaagggagatactgtaccaataccaaaggcccacatacatgcctctagcgctaagtcatttttaaagttagtctgatatgaggatataacattatttagttaaaaattccattactgaaaattcaattgtttcaaacaataaaaacaaaactgggttcttgactcaactttgctcctaaactaccgtgcagccctaggcaaatcgcaccacccttctggtcctctgatgcttcatccaaaataaagaggttcggctacttggtctcgtaggccccaatactcccgctctctaggtgtgattggtggtctcaaggcccatggtttgggtttcaggaagggtgaacctggactccaggggcaggcataacaggggtaatatggtcccttcatgtcttaagggagagaaaacagaattgagggtgatctggaaagcagagacggtgtgaacataaaccagacagtagtagggtcttttatgaggagtgacaaggagagaggctgccagcaggcttaggagcttctccaagggacccactggctggcaagagcaggaagccttggagaacttacttcaaagaccactgccctgcttagggcccacgtcataagccattcatacgctgagtgacctctggaatcatctgaactctatattctgtttttctcaactataaaatggggatgaaaatggtacctaagtaggctgggaaagagcattaattgggttcacctgtacaaagcacttaggataacatcgggcacatggtatgtgctttctcagcactaaataaaacagacagacaagcccggtggagcttcgatgagcaaaagcagcgaggtgggcatccccaggagcagatgcaccatccagcctcaggctccttcctaggcaggcttctcttctctcctgcccgttgaatcagccctgcctggaggccgcactgttgccttcacatccacagagtcaagaccgggctcccctctccaccctctcctccgagtctcctgggttccctggcccctggacaaccagggacagggctcactcaccatcaccagctccaccctatgtcccatccctcatatctaattggttcccagggcctggagatgcccctccatcacgttcctcttgtcttctccatgtcactccagagccagtctccctgccttttgaaatccgtccactcacagctagtggaccactcaccctagagcccagctttcgccggaggtcacttcacagcgaaaatccctggctagctcctttccaacatggcacacggaatcaattccgaagtccactggcctcctggcaaagtgctccaggatcccaaccctgactgcatccagactgacatcccactggcttcacttcaggcccagttaacttgcctcgccgatctctaaatacgcctttcccgtattgttcacccatacctgccgcctcctgctcccccatccctggatatcacaaccttgttcactcatcaagtctcaactaaaatgtctcttccaccatgcagcctatcaagattgctcttcttccctgcaaagagttcttccccagactctctagagtgggtgctgtagtgcaccacccaaatctctctagctgcagaggctcatagctgagtccctctcagggaaccgcccttagccaaagagagctgccgtgcccaaggctatgcctagagtaggggtgcagggtgcacatctaatgactggggtgagaggggatcaacggcccaccaatccccttgtctcaaatcaaacaattctgaaggcccctcccagctcagagctccccacggcgctgccgaggcctccttggtggccgcattgcaatgctgcttccttccttccccgggggttgctcccaggagcacacaccctactgaaactcctgcatgtaaatctgcctcaagtcttcttgagaacctgacctaagtcctgcaacacacacattccatccagcttttttctaggaaatcagcactttgtccatccctcagacagctcagatcctaaccttgacaccttatctccttgagggtcgaagccacggctggttcgccctctcaaatacggcacctggcctgaaggatgcaaggacagatgggccaacagaaagacggacattgtgacagcacaagagagattcccacctgatgtgctctccaggaataaacagcagggaaaaggtcccagaaaactttccctttgtgctgctgccaccacccctttggtggctgacaccattgaccttattttaaaaggaagtcccaccagctgatgtgcagacaccacctttgatcttctggttggggcagagggtcacaattcatgcactgactactccttccatccttgcacccattcatccatcactgtttgcctactacctgcgagccatcaccaaccactgcggacccaaaataacatctggactattgaacagagaagctgctggtccccgttcctctccccatcccccatccttgagccctccatgaagggaactaccagtacagaggcaatcagaacagcagccagcagctccgggggctgcaggaggctctgaaaccctaggtggacgctggcctgcagtctgaatgctgctgtccatgtggggacccgatgggaggcccctttccctgccctcactggcctggtcaactcccagaccccccacaagctagagtctccgtaagtaccatatccctcccctctaacctccaaatgggccccatcagggacgatgcagctgcctgaaggattcagcccagtccatctccttgtcttggcgagatctgaccaacccataacacaaagacactgtgagcctggggcagggatggtgctgagccaggccaggccaggccaggcagacatctggagagagccactggggctctggctgggtgacctcaccagcagcaggacaagtcaccccagaggaccatactacccacagggaggaagccgtgtccaggtcttttccaatacaagattccctaatctgcttacaacacatctggctccttgaccaagtcacagtaagactgaagcggcagctccaggcctcaagagatgctggattgagacccttctgcattctctggacgtccatccctgtggtcttaggtcatcccggatgactgcccacactctactaacagagccatggccacacaggccccagaggttctaggaggaacagtgcggtcagagtggaagaagtgagatgtgccccggggagcctcttcccaccccacctaattcacacaaaacacatattttcctagtggtaactagaactccattcagacctcttccgctgagacccagagagccatatactggccatggatgaaaccagtctaagggaggtactattttagcattaatgctaagagccaaagatgttaatcttctcctcagcgaatgccagtgtctaccccacatagaataaaacttataaagacagctgggcacagtggcacacgcctgtagtcccagctacttgggaggctgatgcaataggatccaggagttcaagtccagcctggacaacacagcaagaccctatctctataaatgaataaatgaatggatgagtgagtgaatgaataatttgtaaagtgagagaccagttgaaagcttgaagactatgtaaatctgagtttcaaagcacagatgccccttcttcaaaataataataataaattttaaaaacagtgagctaggcggaagttattaattttaaatagtcacttccgggcttcatttccccttgttaaggctgcatcctgcctgcattagcaatattgggctccagtgggaaagccacaaggagcccctggacctaagccactggttatggtgactggccatgggcccacctacaagcctctggcccccagtggcctcctgctggggctcgtccacttttcttggcttgtgccggctctctgctgccccctgtggttatcaggtaaaataaccacagataccagagcagaaggaaatggactctggggtcttgactttgatctgagattcctgcagtcttctcctctttgcctctctttatactcacccttctgtgctacttgctctatctcctcctcccccaccaccaaattttctttcttccttgccctggtttggcggtctctctacccatggcttctctccttgccctgtagtcctcacaaggagggtctgcctagctatggccaggtttttctagtcagatggcagccctgccactccgtttctcagcccttctcccttcctacccagaagctggcttgcccccaggctatgctgccctgtcctccaagcgagccccattgccttggtccaggcagatgcagaatttgcaatcaggccacattctcctggaggcccctgcttatctcccttggccaatacaaaagcagcagttcacagagacctggttccctcctgcgcaccagagtttcctccatctctggtttttcaatgccttccagtacagccattgctacaagacatttgaaattccctcttaaaagtaaatggctgaggcaggagaattgcttgaagccaggaggcggaggttgtggtgagcagagatcgcgtcgttgcactccagcctgggtgacagagcaagactccatctcgaaaaaaaaaattaaatgatatttaaatcacaaccacagtttctctgcaggaaagaaactactctctgaagaaccatttacgcctggtcacgccaagcccctccacatctggcatccccttcagcggtcacaaaacacctatgagataggtgctgtcatttcctttttttttttttttttgagacggagtctcgctctgttgcccagaccggagtacagtggcgcgatatcagctcactgcaagctccgcctcccaggttcccgccattctcctgcctcagcctcctgaagagctgggactacaggagcctgccacc[131 bp omitted]catttccacttttaatggaaggaactgaggcctcagtgagaagtggcatctctggaactcagtctgacaacaaagaccaccattttctggccacactcaccgtgtctgagctctaggctgggactctgggagctgcagcaaaacagtgtattttaatctataaacaaccctttatttgagaatcatcctcaatatgaatattattattattcattcaacacatatttgagggcctattctgtgtcaggcactgtgctggacacggggttatattgcaggaaatataagtggttaaactcctcctccttcagcttaaattctagtggtcattatgccattccatctttagttaattttagacacatgcacatgtgtataaaatgtgtatgtgtataaaattttccataagtgaaaacttaaaaattttctaatgggattgggggagggagttgtgccaggagacaaaaaataagcaaaacatatcaggttagctcttggtacacactaaggagaataaagcaaggaagggggatagaaagtgttatgagaacgaagctgtaatttaagaatggccagggaaggcctcaccaagaaaggaacacagaatgaagatctgagagaaatgtattatgtatctattgttacatcgcaaattacccccaatttaacagttggaaacatcaaacattcattatttcatattgttttagcacatcaggaatcagagagtggcttagctgggcaattgtgcctcaggttcccccatgagcttggggtcaggaagtcagtgggtgctgcctcatttgaaggctt[137 bp omitted]cggtgaaaccccatctctactaaaaatacaaaaaattagccgggcgtggtgg[131 bp omitted]caaaaaaaaaagaaaaaagaagaaagctcgccctacggatgctggcaggagccaaagttccttgccacgggctctgcacaatatggctgctgacttcgcccagagcgagcgagccaggggaaagcaaggcaaagggtacaatgtctgttacaacctagtctcaaaagtgacactccatcatgactgccacaatctattagtctcagggaccacccaggagggaaggtagaaagggatgacacaggagtgtatcaggaggtgagtgtgttgggggccatcttggaaggctcctatcacagagggaaggagcaagccacacacatatctgagggaagagaatcccaaatgaagggaacataaaataaaaatgttctgaggcagaagcatgtccttcatcatagagagcagcaaggaggatagtgtggctgaagaggaattgtggggaagggaaaatagaagatgagttcagaggtaatgggggccagattggatcatccagggcagtagttctcaaagtatggttcccggaccagcaacatcagcattatctggaacctgctgggtgccctctgggtgattgtggtatactctaaggtctgagaatccgttattaagagctctggcgctggcatcttacagacagatgttcaaaaatcccagatctattccttttaacaaggaccatgttatttggcctcggtttccctgttgtaaagtacgggatagcagtataggggtcccagcttcctggtgttgaggacaggactcagtgaggtacatacagctcttagcacagtttctgacacagagtaagcactcacagacactaagaacaacaataagacaaaacaaaaaactaaaaccacctccattccttccttcctcttctttgcttcccaacttctaccccagaagctggatccctgcctcacccctccttttgatgcctacaaggagcacatctcccaaaagaggggtgctaggggtgaaggggggctagaatgccttctttagcattgctgcagtgtcaggctatcccttagttaaccagggaaacatcactatgagtggtccccaacttcccactcacagctgcttacaaaattcttagggcagccctacaatcttggtggggagcaggggctcctgtgcccatttcacagatgatacagaaactgtgttactgatgggatgaagcagaggccccgtcagtgtcctggccctttgatatttgccagaaccaagctctggtctggctccagcctgcacagagggcctgtgaaagagcagggccaggaatccaggaatagccaaggaattcgaagggtcgcagggagtagggggtgctgcctggagctgtccaagcctgtctctcaatccccattaggatccctgatctaccagcctccttacagagcgtagacccgtgcaaacacaccgggaatctgtgagcatttaaaagacgatcactgacccaaacttgggttgaagggcaaggaaggttgactgcaatgttggagaaatatgtcttgtcaccgagacaacaggtgctggtaacccactgccagctcacgcatatgactcccatcttatggttgagaaactgagaagacaccttatcgaatccaaagcctggatgctccagatccagaacctaagcacaggtgtttggcaaagctctggtctcatttcccaatccagttactcaccagaactactggagccacttgttagaaatactggtgcccagacctcacacctggagcttctggttgagtaggctgggaggaactcaactcatcatttttatcaagcgatctcagtgactaaccacatgtcgggaaaactagtatagtccatagcaggacggtcacggaacccagccaaggatcaggaggtacctgggcccagacaaaagccccagggagtgggttagacttaggatcaggcaaggtacatggtagcaatgtagagtaatttaaggaaccccccagatgttaccccaaccttctaagagccgcggctttgacatgggtctttgctacctacttgagttcccaggggtgctatatgaattagaagagattgccacaaacccatgagcatgactgagtcctcagagtctttctagaataggtgaagatgaggagaaaggagaaggcacaaaagcagtgagtgctgcagtgagggaagcccggagggaaaaggttccggggagaaggttccagtgtgtgggcacaggcagcaggagtcggggaggtgtttctagcagggcctggcctccttcccaaagtctttttttttttattgtaattttatttattttttttaattaattaatttattattattatactttaagttttagggtacatgtgcacaatgtgcaggttagttacatatgtatacatgtgccatgctggtgcactgcacccaccaactcatcatctagcattaggtatatctcccaatgctatccctcccccctcccccaaccccacaacagtccccagagtgtgatgttccccttcctgtgtccctgtgttctcattgttcaattcccacctatgagtgagaatatgcggtgtttggttttttgtccttgcgatagtttactgagaatgatgatttccagtttcatccatgtccctacaaaggacatgaactcatcattttttatggctgcatagtattccatggtgtatatgtgccacattttcttaatccaatctatcattgttggacatttgggttggttccaagtctttgctattgtgaataatgccgcaataaacatacatgtgcatctgtctttatagcagcatgatttatagtcctttgggtatatacccagtaatgggatggctgggtcaaatggtatttctagttctagatccctgaggaatcgccacactgacttccacaatggttgaactagtttacagtcccaccaacagtgtaaaagtgttcctatttctccacatcctctccagcacctgttgtttcctgactttctaatgattgccattctaactggtgtgagatggtatctcattgtggttttgatttgcatttctctgatggccagtgatggtgaacattttttcatgtgttttttggctgcataaatgtcttcttttgagaagtgtctgttcatgtcctttgcccactttttgatggatgcagaaaaggcctttgacaaaattcaacaacccttcatgctagaaaccctcaataaattaggtattgatgggacgtatttcaaaataataagagctatctatgacaaacccacagccaatatcatgctgaatgggcaaaaactggaagcattccctttgaaaactggcacaagacagggatgccctctctcaccactcctattcaacatagtgttggaagttctggccagggcaattaggcaggagaaggaaataaagggtattcaattaggaaaagaggaagtcaaattgtccctgtttgcagacgacatgattgtatatctagaaaaccccattgtctcagcccaaaatctccttaggctgataagcaacttcagcaaagtctcaggatacaaaatcaatgtacaaaaatcacaagcattcttatacaccaataacagacaaacagagagccaaattatgaatgaactcccactcacaattgcttcaaagagaataaaatacctaggaatccaacttacaagggatgtgaaggacctcttcaaggagaactacaaaccactgctcaaggaaataaaagaggatacaaacaaatggaagaacattccatgctcatgggtaggaagaatcaatatcgtgaaaatggccatactgcccaaggtaatttacagattcaatgccatccccatcaagctaccaatgcctttcttcacagaattggaaaaaactactttaaagttcatatggaaccaaaaaagagcccacatcgccaagtcaatcctaagccaaaagaacaaagctggaggcatcacgctacctgacttcaaactatactataaggctacagtaaccaaaacagcatggtactggtaccaaaacagagatatagatcaatggaacagaacagagccctcagaaataacgccgcatatctacaactacctgatctttgacaaacctgagaaaaacaagcattggggaaaggattccctatttaataaatggtgctgggaaaactggctagccatatgtagaaagctgaaactggatcccttccttacaccttatacaaaaatcaattcaagatggattaaagacttaaacgttagacctaaaaccataaaaaccctagaagaaaacctaggcattaccattcaggacataggcatgggcaaggacttcaggtctaaaacaccaaaagcaatggcaacaaaagccaaaattgacaaatgggatctaattaaactaaagagcttctgcacagcaaaagactaccatcagagtgaacaggcaacctacaaaatgggagaaaattttcacaacctactcacctgacaaagggctaatatccagaatctacaatgaactcaaacaaatttacaagaaaaaaaacaaacaaccccttcccaaagtcttatcttaagcccctgagggccaagtcctgagttagagggcaggaaagacaagtttcaagcaatcctgttcccaggtgtttggagctgacagggaaagtgaggcagccagctattctcaccgtgacgtggcaacggaagagtccaggtggcctaacagtccagtccctgtgctccttgtcaattcattcagactttctgagcactggggagcagcaggggggctcacagtatcgtctctgccctagggagctaacaggctggctggaagaagaatctctttctgcctcagctacatcccctgctttcatacctatccctcccaccagatgtattctgagggttgtgactgtattgaataaatgtggacctgtctcctgggcaccaaggacactcagtaattgataaatgaaggaagactcagctcaaatcaactattagaattatgttcagtaacatggctgatggctgatttttaaagatacatgtgtatatgcatgtagataaaaagaaagataaagagacgagggaaagaccaagaagggggccagggagacagataaagcctctattccctttgtgtggtatgaactacctatcagtgagcagcccagtttaaaaagagcaaagaacatatacaggtgatttacagaaaaaacaattgcaaatgatcaataacaaaaaaaaaaaaaaaagatactcattctcattcaaaattggagaaatacaagttaagactgtaagatactatgttttcacccatggggaaaataacctcctttgtgactgataacccctatctaaccaggatctgcaaaaacaggtgagaatgcctgtctgtgaaaggtaatttggagatatccatcaaaagcccaaatgcacgtgtcttttgacctaacaatagctttaggtgtgcaataatgtaagtatgaaggtattttgtggagcacttttcattagagggaaaagactcttgggaagtgacctaaatgttcaccaacaggggacaatgatgtatcgacagggtggcatcctgtggagctgctgaagtgcatgagtgctggagtgaaaggctccaaaacacactacgtgtacaaaaggttctcactttaacaaaagggcataaataaaatgtctgtgcttgtatatgcaaggcaaatgtgccgaaagaatacacatgaagcatttgatgctggttctttcttaaaaatgaaaccaaagtaagaagactataaccatgctgctataaagacacatgcacacgtacgtttattgtggcactattcacaatagcaaagacttggaaccaagtcaaatgtccaatgatagactggattaagaaaatgtggcacatatacaccatggaatactatgcagccataaaaaaggatgagttcatgtcctttgtagggacatggatgaagctggaaaccatcattctcagcaaactattgcaaggacagaaaaccaaacaccacatgttctcactcataggtgggaattgaacaatgagaacacagggacacaggaaggggaacatcacacacccgggcctgttgtggggtggggggagggggcagggataccattaggagatatgcctaatgttaaatgacgatttaatgggtgcagcacaccaacatggcacatgtatacatatgtaactaacctgtgcacatgtaccctaaaacttaaagtataatttaaaaaaaaaaaaaagactatatatatatgtgtgtgtgtgtgtgtatatatacacacatatatatatattttttattattttttattttttgagacagaggctcgctctgtcgcccaggctgaagtacagtggcgtgatcttggctcactgcaacctccgcctcccaggttcaagcgattctcctgcctcagcctcctgagtagctgggattacagacatgcgccaccacacccaggttcatttttatatttttattagagacagagtttct[132 bp omitted]ttgaatctatgagaaatttccatgatagaaaacagacaaaacttggtgtaggaacagagagacagaccaaggggaaaaagaccagaaacagactcagccagactagtttagcgtatggtaaagaggtgcttctcaaggcaatggtgaaaggctgaatcagtcaatgctatttgaacgatgggagaactacttgaaaaatattgaggtaggtccctttctcattcattttcagaaattaaattccatatggcttaatattttaaaggggccgggcgggtgggggcgggggcggtggaaacagtccataagactgctagaagaaaatattaccatcttttattggtaaagaccttttaaagtgtggcctcaaagggcagaaatcacaaaaggaaaagattggcatatttatctattaagtggagttttaaaaatcacagtcagaataataaaacataaaaaatgacaaccatttgctacatctgataacataggaaaaactaaactgtttctcctactctctacccaacatcactcaacacttctgacatcaggtatatgggagttttccccgccatactagccagcaagtctccagcggacacaagcagagtgtcctacaacttaaatcgattctgatactatctacctggagatagcatcagatcccacaggctgaaggctcattcccacaagactactccccacttcagacaccaatcacaagcagcaggttgtcacctacacatctgacagataggctataaatcagggattctgtaactccctccacgggttcgattcctttgcaaaagcagctcactgaactcacggaaacgctttactaacctttacccacttattacacaggctatgacaaaggatacagatgaagaggcagatggaagagatgcacagggccagggatgggggaaggggcacagggcttccatgccctctcctggcaccactccccaggctccatgtggtcagttgaccagaagctctctacaccctgtttttctaggttcttacgggggcttcagtacatagacacgattgatgtcatcactgggaattgataatcagcctctttcctctccccagaggtttgtggggtaggcgctgaagttccaaccttctaagcatgccttggtctttcctgtgaccagctgccatcctgaagctgcctaggggatcccagacacccatcatctcattagcaaacaagagactaacattctggagattccaaggtttatgccagggagctggatggaagaccaaatatatatttcacaatatccaactacacatgttcaagactcttctctaagaactgcccaaatcccagtttggatacacatgctatgggcgtgactacttggctactgctactggacctgccaagagttgtatagaacaggacttggggtggtcctcttccacgatgagtggccacttctgccaaatggctgctgaagaagaaaaggcaagactgcggagagaaagatgcatgaagagaacccagagaaagatcgcgcccgtgatcctagaactttgggaggccaaggtaggtgtcttgagcccaggagctcgagaccagcctgggcaatatagtgagacccctgtctctattttaaaaagtggaaaagacagaaagaaaaaaaggcagaaagacagaaagaaggacagacaaagacagaaagacagaaaaggaaaaggaaaaggaaaagggaagggaagggaaggaaaagaagtagcatcagacatcaccaggtcccacagttaggacaatcaatcttggcacctgattttcccatccttacgcctgcattcctgtgagatgcccccatatccctctaataaatgcccttttttcataagttagtatgagcgggtttctagtcctataacaagacactccctgcccaaggacatccatcaaagcacactgccctgtaaatggcaaacacaggcccagaggccattagactgacatctggaaaattcttcggtgaccatgttgaactgtagctttttaacaggctccaagcagtgcttccataatctctccatggaaaatcataccacacaactgcttcgaaacttctcccataaatggcatttttccgcttatgcatcaactttttgttgctgttttctgagaaactcggcctttattaacttcaattgctcgcataactaatctgtatatagaagactttccagtaaaaggtgtgactttatgtgtataaattatgctaaaggccaggtacggtggctcatgcttgtgatcccagcactttgggaggccg[134 bp omitted]gaggcaggagaattgcttgaactggggaggcagaggttgcagtgagccgagattgtgccactgcactctaccctaagtgacagggtaagactttgcctcaaaaaaaaaaaaattatgctcaaaatcactgagtattgcttttcacaggacttgggggaaatagaaagaggtgaggctattctggaaaatagaaatcagcaataatctctcaggtgtggccacaaagccacttgtaaacttgctggattcccaaggaagaggatggccatttagccccacggctccttcaggcacacagaaaaagtccttatcatgaaccagcactgtaaaacatgtatagaaattctgggcaaaaaaagctattctcaaacgtcaaaaatggcattcaggatagagaagatcacacaaaatgaagcagaactaggcagcatcttatagttgaaggaaataaggaaataagattccttgggaaattgcaggaggtttaaaaacctccctgcaaagaggactgaaaacttcatccatgcagaggaatggtaagatgctaggaacaggggcagccttaaaggagcgcttctcaaacgtcagagcgcatcagaatcacttgaaggactggttaaaacagattgcagctgttaggcactgactaagacttggtctgtttcatagacttggtctgtttcatactgagatggtcagtttcaagccagtcctatgatgctgtgtgatataagcatcacagtcctctggaggcagcattaaaatgcaaatttctgggtctcacccctagagtttctgatttagtaggtctggggtagggcctgagaaattgcacatctaacaagttcccaggtaacgctgatgctgctggtctggggaccacacttcgagaaacactggtctagaaggcaacaaagggcagggttttctctgcaccaggtgctacctttatccaggtgttggaggtaggaccctttaaaagaaaggcataagaatcaaaacaacccaccaattactcttgacttgaaagcaccctctgcctgcaccatttcctccaaacgggtggtaatgatgaaaactacagaaatgacatcaggttggtcagagagatctaggaaaagaagagtgaacgcaacagggcagattcactgagagtcatgaaatcagccaggttcccagatactcaggtcgtcatgaaagttccttgagattttcatctctgtctctaaattctgctagtgaagaaagttctgcgtttgcacaccttgttataagaatctactcttcatacgaaagagtggagccagctaggtgggatcgcagcattcaaaaatcaccatgtgcccctggccctttctgttcttccgcttcccaaggctttgcgtctgctctgtcttctccgtacctttctgcagtggcacccatctacccaatcagcacataccatttgtatataccaggagcagaaagcaagcgaagtcttggtctgagacaaggagtcatcatctccttgccttccagcctggcacactccttctccagtggcagagagcacacgggctgggcattgttggatgctccttgtatcatataaaaacaaacaaacaaacaaagccctgggccttttcaggctcaggttcacgttcacacagcttggccctggaacaaacccctgatggccagaacataagaccacttgtttaacgtagcaacaccccaaaatacaactagaagattcgagcaggaaagagggaagaggacacgaataaaaacagaaatctgagaaagatcaagagaaacagaggagcaagagggttatgctagggaatgggaagcaaaagaaagtcttggtgctaagctccagccctctcctctatttcagagaaattatttttatcctacttataaacgtaatacaggtccagggaagaaacactggaaaacagaaaagtaaaaagaggaaataaaaccctccctaatcccatgccttggaaagaagcactgtgaacaagcaccttctccccaacttgatgaggtgtcgtctcactgccgggagacacccagccagcaggaatcggggaaaaaagggaagtggaggcaggagctgagcgctcccctgcagcggccatcagggttgtctctcaggggaaatacagagcctgaaaggttttaaaaactagcccaactctctcttttagagatgggggaattgcaatttcaggattctggaaatgcaaggaagagcttaacataaccaggaaacagcacagctgcaggcaagaccttcagccaagtcctctctggtatggttcagagcagccaagagaaggatcaaaagtatttggaaattaattgttttttaagtccctcttttctgcagcttgtaccaaaaaacaaaaacacataattttaaaaaaatccatctctcttggaactgccaccaagacagctcttctaagcaagagcctgcaccccacattcaccgatggcctggcaaggcaatgggaaaacaagccacccttcctgctgctcatgccacctgaacctcatgccgggtattgaaatgtaggggacagattgcaacctgtttacagcatcctagcggacacgataccactgcttagctatcagtgctcaaagataaccactagtgtggggcgggggaagtgtgtcagtttccagggggctgctataacaaaatgccacattactgggtggcttaaagaacagaaacgtattgttacagttctggaagccagaaatctgaaatcaagatactggcagggttggctccttccaagaatctgtcccaggcctctctcctagcttgtggtggccttgggcattccttggctcgtagatggctttctccctgtgccttcgcagcgtcttccctccatgagtgtctgtctctgagtccacatttcctccttgtgatgaggaccccaacatattggatataggtccactatactccaggaagaccacatctttttatttttttaattatactttaagttctagggtacatgtgcacaacatgcaggtttgttacatatgtatacatgtgccatgttggtgtgctgcacccattaactcatcgtttacattaggtatatctcctaatgctatccctcccccgtccccccatcccacaacaggcccgggtgtgtgatgttcccctccctgtgtccaagtgttctcattgttcaattcccacctatgagtgagaacatgcagtgtttggttttctgtccttgcgatagtttgctgagaatgatggtttccagcttcatccatgtccctacaaaggacatgacctcatccttttttatggctgcatagtattccatggtgtatatgtgccacattttcttaatccagtctatcattgttagacatttggcttggttccaagtctttgctattgtgaatagcgccacaataaacatacgtgtgcatgtgtctttatagcagcatgattcataattctttgggtatatacccagcaataggatggctgggtcaaatggtatttctagttctagatccttgaggaattgccacactggaagaccacatcttaacttgatcatttgcaaagatcttatttccaaataagatcacattcccaggcactggcgaattagaacttggacatcttttgtgggacacaactcaacccgtaacatgaagcagaaggctggggctggctgggggtgataggaggcttggatagaggtccacctaacacctggaagttgatctggggatgagaaagtctggacaaatgagaaacagaggagcctgggggttccgcagcagagaccgcaggtgtctggcatggcccagaggggcagtaaagaaagcacaggatagccatactccaaccacagcacaagtccatgcaggtgttcacccaaagcccatgagtacagtaatattgattatgaaaacagtgacattgtctgtaccagttggaaaactgcttttgctccgaccttcccactccatatgtcaccagccaccaaggccccccatggggtccccacaatctggccaagctttcagagtgggagcaggaccctatcccaacatattactccaatagttcatccctctggcagaccactcaataaatggcttggctttcgactgacctcacagaagcgactcttttggggctgagggtatctttgggcacgcagataggcattaaccacagctggcaagagggcagaagcttcatgccacagaaatatccagggtgcctgctacctgcacagcacggcgcatcatctgtccaaggatgacaagaccctcatgccatctcagtgccccttctgctccccttctgcgccactgggcacagtgctcacagggagtgggcaggtagtaaacaacagcatcctgcatgactaacttctcaccccattttcctcctcctacacctcttggatgagtgctacctactttggaatccaactcagaatgaagtaacaaaaaagctattaccccactccaaggtcttcctccaacaataacaatctcatcgatgggacctcatgccagctttgcatagggaggcaccgtctcaaacactggtgggtgatgagctcgtaggagtggcaactcacagcctcgtagggtgtttagaggtggaaaggactttcagcacaatactcaggcaggaaaggaaatgaactccaacccaaaggaaagtctcattttaacaatctcatatccacttcaggaagcattctgtctttgcaaacaagaagccattcgcattgtgttcgcccacaccacccccgcaagaagccatccaagtggttaattagagcccagcacagggaaggtatttagcaaatacttgttacttgataatcaattcacatggtccttgcccactcacttattagaatataacctacagatcatttcaatgcatactaggagtttcactgactcgctgggacctaaccctttaaaagctcactctggttatgtccatccagacagatcctccctgtagcccaaaacttcccgccgcaccacaggttcccattcccacaccccaccccacaggctccacacaagccccagaatggcagagcttcctgcgctaatgttggacacacataaaagccccagaaaaaaaggcagagtaggatgggttttaagatccctctcgaaactggtgcttcatacctgttgactaataagtctgctcgccctagattttttattctcttgcttggtccccttcataatctctcatttccaacttcattcataaaatgtcttcctaggctgggcacggtggctcgtgcctctaatcccagcattttgggaggccaaggagggcagatcacgaggtcaggagttcaagaccagcctgaccaacatggtgaaatcctgtctctacaaaaaatacaaaaattagccaggtgtggtggcgcatgcctgtaatcccaactactcaggaggctgaggcaggagaatcgcttgaacccgggaggcagaggttgcagtgagctgagatcgcgccattgcactccagcctcggcgacagagcaggacttcatctctctctctcgctctctctctctatatatacatacatatatatacacatatatgtgtgtatgcacgcatacatgcgtgtgtgcacgcatacatgcatgtgtgtgcgtgtgcacgcataccagcatgtgtgcgcgcacgcatgcatgcatgtgtgtgcgcacgcatgcatgtatgtgtatgtgcacgcatgcatgtgtgtgcatgtgcgcgtgtgcatgtatgtgtatgtgcgcgcatgcatgtgtgtgcacacatacatgtatgtatatgtatatacatgcatacatgtatatacacatatatacacacacatatatatatacacacacacacacacacatatatatatatatcttcctgactttgtgtctgatgccaccctcacccgcaatacttgatgtaaaatcaccaggcaccctcttttcatcgggcccaaactcagacacccacagaactaaacacggaaaacacatgcatgaagcccagttgagtattaaaaaaaatggcaggtagtggtaaccttctcagccccaaccagctgtgttcatgcaggaaggtggggctggtggggccacacctcacgattttctgaaagaagatagatatccagatgtttacgaaaaaaactcccaatttttcaatgttgaaaactaacaacatttttaagcactgtgttcacagaatggaagcttctgttgacagtctctagtctaatgacaatccagcaagtgacatctaccctccctgtgtctttgcaagacagctctcctggattccagaggtcctgaccttgcctgcctgccacctccctgccatccccaaaacattataatgccatttccctaggagtccagtaatcacagaccagcacttttcaaaaagagttcaaatcaagcaaaagtcattcctgataggtacacaatgcacagtggacctgtacttcctttggcctgtaattaacgagtactggttgatctaatgactggtagagatcctgctatgggattagtgcctggactccactaagccactgggctctgccatgtaatgaatggtaaagagacaagtgactacaggccagcacactcatcctaaccaaagtagaggcaaattaggatgccccagtctaaagatctccatagaagagaaaaatgaaagaagaaactttacaactcctccaaacctccaaggcctgaactgctgcacacgagactctaggttccttgaaggcaggaatgctgttcatcttgtccggatgccagggt[138 bp omitted]gctccacctcctgggtccatgccattctcctgcctcagcctcccgagtagctgggactacaggcgcctgccaccatgcccgg[167 bp omitted]gttgaaagcagagtgcatgcgtatttttttttaatagcaaaaatgctgagatccaaacaatttttgagctattgaccttaaagctttgaaattataagacctgccattacatcctcttatacagacaggaataaaggctggaaaatatacacaagtcagccacgctgatgacacttaagaatataaacactggccaggtgaagggcctttcttggcagttttatactcattctaagtcttgtcaccataaaattgagttgtttgtcttcaatagctccaccatgagattctacaattgtttatgattatataacctttaaccttggggctacgatacatgtttacctatttaaagaagttgtgttttctcattaaatttctataagaggaaattggatttaaatttgttcttcaacttaatcatatttgactatgcctccaccattttattattacacagtgtccttgcaaataaaaataggtggtgactgttagaaaactttgaaaaatataaagttgacattttttctctttccaaatagattctgaaggtctgtgatagaatctgcgtattgttttgttttttaaacaaactcaatttccgaggtatttctgacacccaccaaagtttggcaatcagacagaaagactccctaaccaagacgtctaaagaatggtttctaggccgggcacggtggctcatgcctgtattcccagcactttgagagggtgaggctggtggatcacctgaggtcaggagtttgagaccagtctggccaacatggtgaaatcccatctctactaaaaatacaaaattagccaggcgtggtggtgggcacctgtaatcccagctactcgggaggctgaggcaggagaaatcccttagaacccgggaggcagaggttgca[133 bp omitted]cacaagcctgtttttaatgacacttttattgcaatataattcacatatcattatattctccctctaaaagcatataatataatggtttttggtgtagttgcagagttgtataacctgcaccactacctaattttaaaacatttttattgtctcaaaaagaaaccctgtacccatcagcagtcactcgccattaattccagctcccccccgcaaccaccagggtggttttctgtggatttctctattctaggcgtttcatataaacagaatcatatggcacacggctttttgtgtctagcttctttgacttactgtgatgttttcaaggttcatccacgttgtagcatgtatcagccagcaccttcattcctttttatggctgaataatataccattgtatggctaaaaccacattttgtttatccattcatcagttgatgggcattttggttgctgctggccataataaataatgctcctctgaactgagcatgcatgcacactttttgtgtggacgtgtgtttctaattttcttgggtatacagctaggagtggaatattctgggtcactgaatattctagaagatttctggatcctattctacacatttgtttttgttccacttccatatctgaaccacatgctgctaatcactgactccagctaacagacagtgaggaacgctctcacactgtttaccagtaaacagtcttgcaaagtaactcaacttcctagaatagagcaaacaacaaaatctgtctcttttgtctttttacttgtgtgggtcttcaacttcatactagcagtgtgactgactttaagccacttggcatttgccacaaatgggagattattggccttaaacactggtgaaaaatgaggggtgtgttatgcacgtaagtattacctaaacattacatgttagaacggatatcctggaagagaaaacaaaacccacaccaaagcggattaataggaagctttaagctctaacagccttccactaagaatccattaaagaaaaataataaagccaaaattaggctttatataaattaggctggcgctctctctctctctctctcacacacacacgcacacacgcacacgcacgcaaccctaatttaatcaaccaaatgtaccacatgcacatctttttagtctcacatttgctcaacacagatggacagaaaaaaatagatgtatgtttttgggtacagaaccttctcagaggaacttttattaacacggaattatcagggccattcattctatttggggagttagaaaaggat[225 bp omitted]gaggcaggagaatggcgtgaacccgggaggcggagcttgcagtgagccgagatcccgccactgcactccagtctgggcgacagagcgagactccgtcaaaaaaaaaaaaaaaaaagtgttctactggaaaacttatccagaaactcacattagttcctggcataataaagttaaatgggaatccactcatttaaagaaaaattaaagcaagaaatcaagaaaattactatttggcaaaggaatccaaaagctcacatcctggtttagtcctccaagcttcgctcacaaacataacacatttatagatatagatctataaatctatagagcttaaaagcctgagtgtggtactcatgcctgtaatcccaacattttgggaggccaagataggaggattgcttgagcccggagttcaagaccagcctgggcaatatagcaagaccccttctcaaaaaaaaaaaaaaaaaaccaaacaaaaaataaaacacttttttttttccagtagcctggtgtggtgacatatgcccatggtcccagctacttggaaggctaaggtggaaggattacttgagcccaggaagtcaactaaaaaaataaaataaaataaaaaagcttaaaaacaattttcaactctcctggacttgggttcatgctttaaaaagatgcataggtttcccttaaaaaattgttatttcagattatttttctttatctactaatccacaaactcagttattctcattccaacttaagtcactgccacccatgcccattcctccaaatactgaggcaaaaaagaaaagattagaagactgggcagtctggtcacagcttggcttataaatgaccagatagcttggatcaagtccctttaccatgcagggacttcatttctatatatgtaaaacaaacaggttctatttctttttttttttctttcttttttgggggggcgtctccctctgttgcccaggctggagtgcagtggcgtgatcttggctcactgcaagctccacctcctgggttcacgccattctcctgcctcagcctcccgagtagctgggacttacaggcacccgccaccacgccgggctaaatttttgtgtttttttagtagagacagggtttcaccgtgttagccaggatggtcttgatctcctgacctggtgatccgcccgcctcagcctcccaaagtgctgggtttacaggcatgagccaccgcgcccagcctgattctatttcttaaaccaggtattgtcaaactttttctgttaagggtcagagagtaaatattttcactttgtgagccacgtggtctctgctgcaactacagataccctcaacttatgacagggctatatactgagaaacccattgtaacttgcaaatattgtatgtcaaaaatgcatgtattacacctaaactactgaatactatagcttcgcctcacctaccttagacgtgcccagaacacttccgttagcctacagttgggcaaaatcatctatcataaagcctattttgtagtgaagtgttatacatctcttgtaatttattgaatactgaactaaagtacagtttctagtgaatgagtatcacttttacaccaagtcagatcgttaagtccaaccattttaagttggagacagcttgtactcagctctacaatctccgtgcaaaaccagccatagacaatatgtaaacaaaagggcatggctgtgttccaataaagaaagcttcatttacaaaaacagctgtgagttgaatttggcccataggccacagtttgccaacccctgagttagaggatttagaagtttcctcctaggatgattatgaagcaaaatcactagcctctgcaacccacttttatgaaagatcaagttatcaaggtctgagggtggaaacagatgttcaccacagcactcagttctaggagagtctctgcctagggacacaggcactggactcttcatagttccatcaacagccaccttctgttttgcttggtacctcactcatgctctgctgaccactgccttgggcttggatgaagcatcactctgcatggtggaatctggctttctgagagcttggtaggagtcagatggtacaaaccaaatgtgtagggaaatagctgtgcaaggggaggggcttggccagtgtgaaataggagacaagacagaggtgagtagataaaacatctctgctttcctgcagactactccaggctacggctcctccttgcagcccttccagaagtgaacatatccactaagtgaccggctgggactctgcatttcactgtcaaacaccagccagcatcacttggcattgttctttggctttccttcccttgcatacctaccctcaccactttgtactgatacctcctaaataaggtgttaacactcaatccttgcatcaggctctgctttatagt[144 bp omitted]tctactaaaaatacaaaattagccaggcgtggtggcacatgcctgtggtcccagctactagggaggctgaggcaggagaatcgcttgaacctgggaggtggaggttgtgtgggccgagattgcaccattgcactccagcttgggcaacaagagtgaaactccatctcaaaaaaaaaaaaaacaaaagataccatctcaaatggtactctttgtttaaaaaaaaagaatggcacagataaaactactggatttagagtataaaaagattaataaataagaagtaaaatcttgactaatacattaaactaaactaatcttggccatctatctatactggcttcaaatatccctaatgtccaaatggtaaaatgtatcctaaacatatctaaaaggtcagcatctctccaaaaagagggcctgaatacctatgactatattaagtgaagaagcatgcatgcctggccttccagttatatttttattttatttatttatttgagacagtggcttgctctgtcacccaggctggagagcaatggtgtgatttcggttcattgcaacctctgcctcctgggctcaagtgatccttccacctcagcctcccaagtagctgggactacaggtgtgcgccaccacacccggctaatttttgtatttttaatagagacggggtttcaccatggtccccaggctggtcttgagctcctgggctcaagtgatctgcccacctcggcttcccaaagtgctggattacaggtgagagccaccacacccagccgacctttcaatcataaatggagcaaaaaatgttgtgctatatctcttgaaatataattatttgttgtataaataagaggtccctgtcgtggtctgaatgtttgtgtcccctccaaattcacgtgttgaaacctaattccccatgtgccagtatgaagcggcggcacttttaggaggtgactaagtcatgcaggctccaccatcatggggttagtgccattaaaagagaaacccaggcagggcgcggtggctcacgcctgtaatcccagcaccttgggaggccgaggcaggtgaatcacgagatcaggagatcgagaccatcctggctaacactgtgaaaccccgtctctactaaaaaatacaaaaaattagccgggcgtggtggcgggcacttatagttccagctactcgggaggccgaggcaggagaatcgcttgaatccaggagatggag[133 bp omitted]gaatgcagctgttcttatgaaccagaaagcaggcccacacccgacaccaaatctgccagcaccttgatcctggacttcccatcctcctgaactgtgataaataaatttccattgtttataagtcatccagtctatggctttttgttagtgcagcctgcacagactaagacagtctccttaacactagctgaggtccctggatggggtaggctattgataatagctcactatcccaaaccgttagcaacacaggcaacttttggtgggaatggagagcttccctggacagcacaagacaagcaatttcctgataccaaaaccctgggagttcctggggctgaactgaaggccactctgcatgatgaaatttccagagagccacaagaaagatggggacttcccaaagtccacggagcatgctctgatggcattggcaagtttatatgaaagcaacggcattactgcattaaccactgaaacttcctgttagccatctggcccaacgccgtttactaaataatccatgctttccccagtgatttaaaacaacactcttatcataaacctgatctatatttcagtctgtccctgactacccctccctatctattctcccttgcctttgatgacattaccttctcctggattccttgtatctctgacaattccttcaaggtctccttggctgctgccttacacctgtgctgcaaggccccgggtgatcttctacatcctcatcacttcacctctctgctgatgaaacacaaatcctgggccaccctctgtggctgggcaggttggtcactgcgcaacagtggccaggccatgtacccacatggctcaccaagttcccatctctagctcagaagtcctctaagtcacaccgtagccatccaaatgccagccatctctcccagaacgcaccccagggaaccacacactcagcatggactcatttttctttcttcctaacctgttcctcccttgaataccctatactcactgtatggtcccatcacacaaggcagaaaacccggaggaatccaggcacttccaatccctgacctgccacagccacatcctgtctgacagattctacctcctcctctccagccactgctgtagaattggtgtttgacctcattatttctcctctcatttagtctgtcggcctccacgcttaccggccttaaagccttcgctctgccgcacaagcagccttgccacaatattctgatcatgtcacgccaccgcctggaaatttcccatggattcccgctgcctacaggataaagacctgactcctcaaaatgccccaaggcccctgactctctctctcacctctttcttccttaaccaatgccaaacacatccgctgtttttctctcctgcctggtctttactcatgctgtaaccttggcttggaatgcctgagtcaaggccgccccctccccctgcaaagacttggttaatacccagatcaagctgactactcccttcctcgagcccccagatttccacacgaatacctgtaacacttataggtttatatgtgtctctggccctattagaactgcaggttctgagatcacagacagcatctagtttgattttggatccccagagcccggctcagtggctagcacagtgacaacctcatccataa[132 bp omitted]atggtgaaaccctgtctctactaaaaatacaaaaaaatagctgggtgtggtggcgcatgtctgtaatcccagctactcaggaggctgaggcaagagaatcgcttgaaccg[134 bp omitted]aaattagactttcaactggttataggtgtaaaaatggggacagaacacctattatccccaggcaccctctggaaaagaagagattagggattaagggagaaagactagaagcgtctggaagaaaggtagacagacaaagaggaagagaagaatggcctgcttagaaccgggactgcactttctgggcactgggctagcatgtggatgaaatgccacctggagagcgacagagcaaagatgcttaagcaaggggccaggcagaaaggcagatagatgcagctggcccagcagtgaggaggcacaagctcaggtgcctccaggagtcaggaggtaagaaaaacatgagtggctattctcatagatgccttcctgcagaaaggcaggcagattaaaatatatttaaaacatccctacagccaaacaaaacaagtctaagaaacgattccagaggagaatcagaaagatagctgctttccttctcccttagactgccgagcaaaattattaatatgatgttcatgggctgcatgatccctacaaacacagctgactctttgccatcagtaagacactccccatcccctagcccttccttacccttcccatcctgcagcttccttctccaggaagcctcccctgattccccagggtctctctgtgacatgctcttaaaacaccctggactcctgcttcacaaccctttcctgattgatcaaataggttttcacttaaaatctgttcccactataagaagataaacacttgcagggcagagactttgttcttattaaatccccagtatcccaagactcactctgcctggtacatatttgaggctcaaactatgtgttgaaggaatgattcaatcaaacagataaacaataagttaaggtcgggcacggtggctcacgcctgtaatgccagtactttgggaggccgaggcaggcggatcacaaggccaggagatcgagaccaccctggctaacacggtgaaaccccatctctactaaaaatacaaaaaattagccaggtgtggtggcaggcacctgtagtcccagatacttgggaggctgaggcaggagaatggcatgaacccgggaggcggagcttgcagtgagccgagatcgcgccactgcagtccagcctgggtgaaagagcgagactccgtctcaaaaaaaaaaaaaaaaaaagagttaaacaagtaatgaataaaactggcatatatctagaatgtaagaccaaggtaggtgctggaattatttttagcataaaagaggagagagccgagcacggtggctcatgcctataatctcagcactttgggaagcagaagtagaagccagaagttcgggatcagcctaggcaacatactgaaaccctgtctctaccaaaaaaaaaaaaaaaaaaaaaacaaaacaaaaaaaactgtttttaggcatagtgtaatcccaacactgtggaaggtcaaggccagtagattacttgaggccaagaattcaagaccagcctgggtaacatggcaaaacatctctacaaaaaataataataataataataataataataataataataataataatacaaaaagccaggtgtggtggcacatgcctgtaatcccagctactcaggaggctgaggtgggagggtcacttaagcccaggaagttaacgctgcagtgagccatgatcgtgccactgcactctagcctgggcaacagagtgagaccctgtctcaaataaataaaaaatataaaaaaataaagaaatcagccgggcgtgatgacacatgcctgcaatcccagctactcagggggctgagatgggaggagtgtttgagcccaggaggttgaggctgcagtgagccatgattgtgccactgtactctagcctgggcaacagagtgagaccctgtctaaaaaaataaataaataaataaataaataaataaataaataaataaataaagagaggaagggcaaataggacaagtccttgtggagccaacagacagcctgaagcagggaccagcagctatggtccaagggaccaactggtcaaaccaactatcatatggcccagtgaacttgccaacgaaaatcatcttccacttttttttttttttttccttgagacagacggagtcttgctctgtcaccaggctggagtgcaatggcgtgatctcggctcactgcaacttccacctcacgcgttcaagcgattctcctgcctcagcctcccgggtagctgggactacaggcgcccgccaccacacccggataattttgatatttttagtagagacggggtttc[133 bp omitted]tcatctgaaattcctattttcggatccatagataaagtcttattggaacacagctacactcatttgtttacctatcatccagggctgctttcatgctgaaacagtaaagctgagtggctgggatggagaccatgtgaccctcaaagcctacatactgactacttggccctttacagaaaaagttcactgacccctggcctggagcctctgtgggatcacaatatctcaggacccataagaaagctgtcaccagtggcatctgctaaagtctgagtcccagaaaaaagctgccagacactgtctattgatataaaatatgacttaaattaatagagtgcaggtgaaattaatagcatacccatgcgatggattactacacagctgtttaaaagaatgggttagactgaaatgtacaaagtatagaaagatgtccacatacactgtcaaagtaacttaaaggacaacatagacaatattttccaatttattttaaaagaataagtatacatatgtttaaaaggtgagaccggggattattttttatttgaaatcattttgtacttactgaattttttaccgtgaaaacaaactagtctctaacttaaaaaaagataaagatgctgaaattcagaaagccatttccccccatgcccctttgcaatagagtagcttatttgggacaataacggatccaaattattcatatcccctagcaacctgaccttccaataatttggatccaatgttgtcccaaataattgatgatctcatgatcctacggtccaaattctgtgtttggcagatgggtgttgcatacatagacacactctcctctgaaatttcaagtctccggtaacagtgcaaagctgttcatgtgtttgttttgaggaagtgtaagattagaacggtcagaaatagtcctacttcccttttcctagaaacttcattacctcttgcgctagaacacccctcttgagcctgtggaaggtcaggttgccaggggatacgaataaaccagctgccttctttgtgtctctgctaaacagtagctggctcccctgtcactaggaccccctcctggtgcaggcttataaacatcagctgtagtaacgatacccccaggtgggaaggggtggtcatgtagtcaggcaggcacagaggagtgagaggccaaggctgagccagcagtggacttgggtacgattttcatcttttgccttggaacgcatgtctgtgattcccactaaatctaactttccttggtttaaatcctctcagttctctcatggcaatttctctggggagtcacggaggtcaagacacagctctgttcagctggtttaccctgtcctgccctgcccaagaccacagcctgcaacagtgccctttgctcaccttgttacagaacctgccacgtggtgcatccccttttataaaccatccacagcaaacttctggggatcctggggtcatttgaaggcctgggaggtccctaattattggggtcattgaggtgtggtcctattcaactcagatgcacatggaacctgtactatttgatgggataaataacccataagcacccccggcatttcccaaaaaacatctggagaaatgccagccagtgagatacttaaggaaaaagatgacgttgtagtgaaattagggaaacctcgcatttgcaacccctgtattgaagcttcaagatcattaaaaccttcaaaattccaagacatcatgcagtgactttgcctcgttcattttattcaagccagctgttgaccatagaaccttttgagacacccttcagaaaacccagccccagacgaacaggttgggtttaacacagatacccagggtggacgtcagggtccaaggaagactcaaaccataaagggcagccttccttccaagatactcccagaactacagacccagacttgcacccctaccacccagcacagtgggaggagtaagactttactgtagcccctgagcatagacttaagaagaaaaaacccccaaacagagaggcgaagaagggagaaaaaacgtgcccctctagagagccagaatgccagggggttggtgcaggattctcccccgagcgggactcaccattggtggtcgtgttgacatagtaccgccggccctgaggcgacaggtagctctgccagccaggtggaaggatgaccgtctggctttcttctcccggcggaggggggaccattccaggcttctgttggagaagaaagaaaaggtcacacccatttggcatttttgcaagagtttttaaaccaggaaggcaaaggctgatgaattcaccctacagtagcgtgacattgggaagtctgcggcccataaacccctgaggtcagaggcagcacacacgtgacctccggggttgcgtgagcatgagcagtgagaagcacctgagcattcagagcccctgcacagaggacagctcctctgggagcagagaggaaaatgccattcagctaatggagctagactttctccacggccccctagaaaatcactcacggggtgctgagcttgcaagggggccctgtcactccaccacctcccattgtgaaatctgaagcctgaaattcccagaccacgaagcacagcagcagacaaggccccaggcttgctgtgcaaacctagcagaagtaattaatgcaagtcatcccacagccagatgcaaaacattctataataatgctgagaatccatgaagagctggatggagcttctctcgccaagggtccagatcactctggcaaaaagaacgaggactcggagacagagcagacgctgacttcccattgtatgcatttatgtgcaattaattcttttaaccatgtatagaattacttttcgttaaaaaacaaatcagagaaaaatgtatatgacatacaaagaaactagatatctagt[134 bp omitted]accccacctctactaaaaatacaaaaaattagctaggcgtggtggtgtgcgcctgtagtcctagctactcgggaggctgaggcaagagaattgcttgaacctaggaggcggaggttgcagtgagcagagatcgcaccactgcactccagcctgggtgacagagtgagagtccatctcaaaacaaacaaacaaaaatataaaaacaaacaaacaaaaaacagccacgatccctgggtgctgggattacaggcaattattatactctcctttctacatatctgttccccctaaattttctcccataaacacagaaataaaagttgttagctaaagaacattttaaaattaggacagagagtccaaattagcccgtaagattgctgtgccttttgaagtaaattgattaaaatcagaattgtagccatacgaagagagtagccatgaatttctcagcaaagccaggggactgttcacaaacagtaaaggtaatcggctcccaaatgtcctcagtatcccccagctgtgcccatagtggtggtccctggtgacccccgcttaggaaaacaagataacagaatgaaagagagcagcagagacacacagctcccaggctactctcacgctttgtgaaggttgcaaaaccacgtgccgtggcttcccgtagtgccctgcatgtcattggagggaacgagtaaatctgagctgctcggggactttgagtaaacacagcctcccttctgccctctgcgtagctgcggtgtaagtttcacaatgcattttcacaacttaattaaaagctttcccctatgccctggacgctccatctcctacacctgctaacctgcagtgcccgtttgattccgtatggaagactgtcttctaagacagcaggagacagtgaggtggacagcagccaggatcaacacggtgtggcatcccaccagggtcgcaggttgctgtctcaccagcatgtccagtaagcacaagcccacatctgggcaggtttacctgggccctctcactgctttggactctccaggattggaagatagccaaaatatatgcaagacaaataggattataacaacgtgcatgtgtgcgtgtgtgtgcgtgtgcatgcgcgcgtgcatgttgagagaaagagaagtatcccatgcacaggagatgaacattctgtccaataggattagaaataaagtcggcatgggtggggggtcaggggattaaaactgagggttagggccaggtgcaatgtctcacgcttgtaatcctagcactttgggaggccgaggtggaagaatggcttgagcccaggagtttgagaccagcctgggcaacataggaagactccgtctgcaaataatttttaaaattagccgggtgtggtggcatacgcctgtggtcccagctacttaggaggctgaggtggaaggattgcctgagcctaggaggttgttgcagtgagctgtgatcgcaccactgcactccagcctgggtgacagagtgagaccctgtctcaaaacaaagaacaaaaaaatacaactacaggcatgagtgtttgatgaaagagattctagaaccagaggggcaagatgccaggtgtcctccccttgagtgaaatattctagtttctccttcaatcaaacatgggaaagccatattggtacttatccaaataacttgggaggaaataggaaggatcaaatattgacatggtcagaaaaggggtgcaggagacaggaacccacaggcacagcgaaaacagccctcaggctcaaacagccttcagtgccaatcctgcctggaccgcttgacagccatgtgaccacaggctactgactcaccaggctattctcgaatctgtgaaacgaagggtgataatatgagcccagttgtggaagacgacggagagggtaacaatacgtaactcagcacctagggcagcgcctgtcctgagggatgcgcaatgaatggggttttccactggaagggcttcacacagtccgtctacggcgatacggacctccaccctagcctcaccatccctctgtctgaaatgtcagcatcaacagtcacttctctgaggtttctgtttccaatactacccgacttgaacggcaaacacctgctggggaggttaacagcctgagagctggccagtgcgttctggtgagagggctgggcagtgaggagaccactccttacaggagctggagagccagtggacccaacctgtgaacctcagtgtcccacccaggaaagagcaataatgatgccgtcccttctccgcaaggcactgatgaccacgaggtctcccgcaacgaggaaattcaggaccttacagaaggtgggaggcaccctgatactgagccgtgaagggccatgagatgctgaaagaggtggggaggagggcactggggccaccaggcccatctcctaatgtggctgatgtggcaaagatggtctccacatctccctcctgcagggccgcactctgcctccatctcccgaggcagccacagtcccatcacctttctgttctcttagaaaggagttcctcctgatggctgactttaaaagtcaaaagacatggagacaaccaggtatagacacaaacacctagaaacaagcagtcagacaaaaattggtacatggatgctcacagcaatatcattcgtaatggccaaaaagtagaaacaactcaaatcccccatcaacagatggatggatagtgtagtacagccatacaatggaatattattcagaaattaaaaaaaaaaatggagccgtgatacatgctacaacatggataaaccttgaatacattatgctaagtgaaaggagccagacacaaaagaccacatattgtatgatttcatgcatatgaaatgcccagaatgggcagagccatagagacagaaacagatttgtcttttccagaggcctggggaggggagaatgggtacacgttttccctttggggtaatgacactgttccggaactggatcgtggtaatggttgcacaatatcatgaatacataaatatatcactgatggtaaatattttgtcatgtgtattgtaccacaattaaaaaaaaattttttggctgggcacggtggctcacacctgtaatcccagcactttgggaggccaaggtgggtggattacctgaggtcaggagttcgagaccagcctggccaacctggtgaaaccctgcatctactaaaaatacaaaaattagctgggcatggtggcaggtgcctgtaatcccagctactcaggaggctgaggcaggaaaatcacttgaacctgggaggcggaggttgccgtgagccaagactgcgccattgtactccagcctgggtgacagagtgagactctgtttcaaaaataaagaaaaaataaaaaaataaaaaaacttttttctgccttctgcgaaggcagaagttagaccttcctaccttcaagtcttcacttaagggccaacagcaccagcattacctcacccttcatggccacagaggggcaagagcagccggcccccaggcatccagaggacacagtgtgcataaccacccaataattaaggtctctctcaatcttattcttctaattagtttccttccaagttaaatccttcccttctcttccttagtcctgtggctttttcccttcaattctgtcagcactttcccgtgggaactgtactggaagcagaggtgacacaggcccgggggctggggacagaccccacctggaaggaacaagatcagaggtagcaggatttggggtgggggaaaacgaaggaagttctttctaactcagaaattctttacctaatacagggtgtctttgtgggaataataaaacgcggcctcttcctctggaagggaccatcccttggccagattgcaaggacaggcttcagtccctctccatccaccctcacctgggcctccttgttcagtaggcaacctgctcaatgatatatatggaaagagcatcctttaagaatctgaggaaggctatggatcttctgtcccctaaaatgggtgcacatacacacacacgctatttcataagtaatatcaggaggtttctacactacttcagaaccctactctagaaaggactcgagaaatatctgagcccaggtccatctgtacccatcgataatgactttttaccagtcaccaaatatctataatgcatgccagactggactgggtgctttagacaatcagctactcgtcacaacaagcctgcctcatagatggcatttatccccgctttaaaacaaggcatctgagacgcagagagtttaataacttgcccagtgtggcacggttaatggtaaaaacaaactgcttaaaaatatcagctggcgagatgcagtgactcatgcctgtaatcccagtgttttgggaggccgaggcaggaggattgcttgaggccaggagttcaagggcagcctgggcaatggagcaagaccccatctctacacaaaattaattaattaattaattaaaataatagctttgttctagagacttctatccagttaccttaaagttgggccacatctctccccagctacacctactcagctccatttcctcactgagaccacctgacaccccagctccttcccaaggaggatgacaactcaagcctgatcctcctgtctcccagtccccaagtgagcatatgatgtgcaaaaatatcaccgcccgcgtccaggccgtcacgttccctagctgtaggctgacttccttgtctctttatttaaaaaaacaacgcaacccccaaaattttccccttaatggtggctactgattcctcctttaaaaaaaaaaaaaagcaggcaagcaaagtcacccagagattacagagatcaaaaacaaatccccccacagcagtgtttttcaaagtatggtcaccgtgggccaccccagcagtcacctgggatgtgagttcaagtgcacactctggggcctgactcaatctccagagcagcctgggaggctgcatttgtcacagtgatcctgggtgagtcctgtgctctaaagccactccgttgcagcattagaggcagcaactgagaaaaaacatcacttctgaaatgaaaactgagatcatagaatttttataagcatgatttgtaaaaagacagtgttgggctgcacagtgacttattaaagaaaaagattctgttccattgccccaaacccttcaaataaactatttaacagacggtggaggttgtctctgcagcctccaggcagtacagaccctgctactccgctccctaccgctcccaccatgcttcaagctcaagttcaacccggatgccacctccacctccgggactctctccccctccggaggtttctgagaacacctgactcttaccttatcctaaagccgtgagcaaacgctactcgctggtgttaatgggtggtcgtcagacactcgctttagcagccagatcagacggttttaaggtctcccactctgcatcctctcacaccccaaacccagaagcaataggagctctaaagaaaagcatatccacagggccccacacccccactccccccacacccagatctatatataacagctctgaagttgtcagcctaacgagccactttctggcagacccgttgctatggcaatgcttgctaatgagcccagtgccgtgattggcactgcttgaaggctcctccacaaaggactctccagcaagttctctcttccccaaccacggaggcagctggacacccagaagcagccagggcatggctgggcacgcctgggaaggttgagtcccggagtagtcctggactcagcagccaggagtggccccactgccagctctgcactcctcagggagtcaaccaattactaatggggctgccagagcccaccaggaagatcaagacccagcagggctggagactggcaattcactcccacgtcatgccttcctggtggacacctgtttaggtgggcagactcctacacagagctgggaacagctacccgagaaggatactctcctccagctctgggttaagacacaaatcatgcaacagtgacatcaccagccccagagtctgtctctaagaatactgggcgcatttcctgtctcacaggtgaaagtattgcgctccccaactccagcagcctttctagccatactcagaaatttcagtgcacagaaaatagtaggggacccctggcaacgtcacaacacatcctgaggactgcagtcttcacccagtagttatgcaggagacaggctggaccccggcagagtcttcattttcttctaaaggtcagagattcagagacttggcctggaaggaggaggttgggagagctgccatatcaacaaagaaacagactataagattcgggaagacagggccatgtccctatccctcttttcacagctttaatctcagcacagtgcccagaacaatgaatgaatgaatgaatgaatgaatgaatgaatgagtgaatgaaaactgagaattatagtaggaactaggcttcagaaatatttgaggaggctattttaccaaataagcagacagggaatgggagtgggagttagagaaagtgtgtgtgccccatctgtgaacaaatcccagctcttaatggatctattgaatggactctgctatggtttgaatgtgtcccctccaaaactcaggcgttggcaacatggtaggattaagaggtgggacctttaagaggtgatcagcccatgagggcgcctccttcagtgggattgaggctcttatcaaagcagcttcacgcggtattcactagcttgtccttctgccttccaccatgtgaggacacgctattcctttatctggcagacacagcaacatggtgccatcttggaggcagacaacagtcctcaccagacaacagaacctgccgacaccttgatcttggaacttcccagtctccagaactgtgaggaagtcctgttcttgagctaggcatcgtggcttgtgcctataatcccagctactcaggaggtttgcttgaggccaggagttcaaggagagcctggacaacatagtgagaccccaccgcccctccatctctccaaaaataaaggttttttgtttgtttgttttgttttttgacggagtctcactctgtcgccaggctggagtgcagtggcacgatctcggctcactacaacctccgcctctcaggtttaaacaattctcttgcctcagcctcccaagtagctgggattacaggcatgcaccaccacacccagctaatttttgtattttgttttgttttgttctgctttttagtagagacggggtttcaccgcgttggccaggatggtctcgatctcttgacctcatgatccacccaccttggcctcctaaagtgctgggattacaggcgtgagccactgcgcccggccttaacatttcttttttttaaatttagctgtgcatggtggtacgcatctgtagctccaggtacttgagaggctgaggggggaggactgcttgggcccaggagttagagactgcagtaagctatgattgtgccactgcactccagccgacagagtgagatactgtctcaaataaataaatacattcctgttcctcatacattatctggtctcaggtattttgtaagagctgcacaaatggggaagggggaggcaagataatatgtattgtttattttattgcagaaaatagatagaggaagaacatccagaagcctagaagcctcaagagaaacacaaacttctcatcaggatctcacatagtatccagaagaaacatctcagaaaagtatctagcaacctcaacaaagggcaggaagatatgacattatgatacaagaacaaaaactcataagaagagaacaaaacaaggcaagttggtttgaaaaaaaaaaaccaaaatgatataaaaaaggaacaggaaatgataaaaattatagggaagtttgaaaggttgtaacagaaggaaaatgcacattggttgcaataaaacatggaatcaatactgcaaaacaaagtgaattcgttatgtacagaacaaacgagaattgttttttccccagaatgcaaaggaaatgggaaaaatgcaaacgtgaggacagaacagcaaaccaagacatggatactgggtgttcctgaagaggagaccagcagaaaagctctaacagaaaagaaagaataaacaaaggttgatggggaggaaagttccagagctgggccacacgggacgtcctacgctgttcaaggcaaagtggatttcaaaaaaccaaccagcagacataccctaacaacatatttacacagcaaagataaggataaaagtcctgtaatcatttacgtgggaagaccagtgcaagaataaaaagaaggctggtctcaaacttctctgtagccacatctcaaaagacatctccggtgcatgatggggaaaataccacgaccttcattgtacttcaaggtagccaagctgtctttcacaagggaaggcaacagaaacatattcttctagagacaagtactcatgtcctccttagcagaagtacttaagagatgtacttcaactgcctgaaagagcaagacaaataaaggtgaagaatgacgaaatcacggcacaaaaggatccaggctgaacgctgaaagcagcttacagaaatgcatacgtaattatgcatttctagttatacaatcatgtatacatgttgctattctcaatatatactgtaaaaaaatgaaattataacctgagtctcaaatatagacagtactagaaaagggctgggtgcggtgcctcatgcctataatcctaatattttgggagtccaaggtagggggatcacttgagcccaggagtttaagaccaacctgcgcaacacagcaactccatcaccacaaaaaatttaaaaattagccagacgtggtggtgcacacctttagtcccagctactagggaggctgagacaggagaattgcttgaacctagaaggcggagattgcagtgagctgagatcatgccactgcactccagcctgggtgacagagcgagactccgtctcaaaaaaaaaacaataataataataattataattatatatactagaagagatcaagaggcaggaggaacactgagatcatgagaacaccgagggagatggaaacaaaacgctgaccttcctcccgtccccatagtgaagcatccgtgtcctgttgtccctcctgccaaatatcaggtatcaggtacctgaccagttggcatccatcctctgtccttgcttctcatgtccactcttgtcttttcctagaaactgacaggttctcaacctgaaggaacacaacagagggaaggggccttggagacccaaatccctggtgctgtgagtcttttgagtcttacctctaccgggttgtattggccccgagggggcagtcagcttccagggggaatcctgagccctggaatccattcaggtggataggttgggaccaaagtactttgtggatgaaggaaaaatcagtaggaacccagggctttccaaagacctcatctgaaacacctgtttggctttgtaagccttcaaagggttctcagggccaaaatacagagaagagcatgcggctaatttcgggcctgggcctgagcatgaccatgtcctgtggaactgtggttggacccgtgtgaaaagggggtcaggtgcatgaggcacacctgcagttctcaccagcaagaagccacaagagccaggagggtcgccttcctttctcccagttttctatttgcaaaatttgtcggaggtattaccagagtcctctgtgtgtcacctcaaacccttcttattagaaatcacctagtgagcagggctgcctccttgagtccctaaaagaaacttctcaaatgaggctttagtagatgcaaatgtcctccggcctcttccaaacctggcactatccaagtgtcctcaggcctcactacttggtgtagatagatgaatggggtgacaatgtatgtggcagcaatcatcagcacctcgctggcttgaatatcccacttgctcacatcagacgcccacccccaccagcctccttggacgaatccaaaagtgactcgcttgggctccccaaccaggttgcaactccagtcgccatggagtgtccggcatactcttcttcatctgcattagctacttcctccccaacaccatcactgtcctctgtccacgaagtggcaagaggaagcctcacactgtggctgtcactggcacccatcataagaggtagacattagggccatgggagttttctcccagccatgggcctgaaggctgaaccacttgggacactccagacctatccagctcctggtaggcttggcaagggtcacagccaccctgcaaacccccagcacatccctgagggccagtcaattcattgggtatgtttgtcaagactgggcagggagaggacacagaacaatagactctgtattttctgaccctgtaaagaaatggagtgatctggttaaccaggaattttgatgaacataattacaacgcagtccctgcagcaaggatacaggaagttcacccatcaaccctcacagggaaacttgccaagctggaaatatggagtctccggggggacaaggattgatgaaaagatttgcaaatgatcctgcaaactgcaaggatgagttggacggcccctcctgggtcagaagtcatgtcacagccttgcagcatctgagaatcaagctgtcggcagagggtaggaaagaaatgccttccacgtgggccttgcagaacccctattcctgcatgacccttcctcctctgactctggagaatgagatttttatggtcgttgcacctgctgtacgaatgtaagacagaagggccagttaatagggttccagaggagacaatgcaagaaatgaggaaaactctgaatgtgagcatgtttcttgcatctgagatggcccgtccttttcgttggtggcatctccccagcggcgccatacggcatgatggggatctgagagacgcccactcttcagcatgttttggaagaatctcggcattgacgaaccagcataattgtgccaccaaatatcagagtcactcttttggcctctgatagacgggtttggagcaggtgcctaaaggccttatgactgtgttttagaaccacaggatctggggtggaggacctggagtgtcatcccacaagcacccctgaaatacagagaacagctccagaaataacaagggaagcagggactgcttccccgccttgaagcctggaggggttggggaacctcagaaaaaaaaaaaaaaaaaaaccctacattttgttccatttcaaggtctctctggtcctgatgtttcagcacaattaaaaatgtaattattaaatgacaaggtagactcctcccaatagccggttccagcttctggattccaagccagaaaacctgaatgactgtgctcgctggcttttgattaacagagacattttattcaaactctccatttcctgatgaactgttgaggaatgttgcttctttcctcctcccccttccctagcagaataaaaatagtgtgggccattctgatatcctagccccaactcaggatgacaaaagcattaggagacagcacaaaggcctaggcataaagaggtgctgtgttcccagacagcaagctgtgatgtgtgcaattatcttagcctctctgggcctctgtttcctcatctgtgaaatggggggattgctagccttgaggtcctataacccatgcatgggacggcttttgtaacacagcctaaaaccacaaggaaaatatcaaggcagttaaatgtccagctcagcttccaaaaacagcagccacataaacaaaagagacgacagaggcctgacaagacacaaatcttgatgaaatattgctttgctcgctgcaagcttccctccaaacacttttgggctctaaagagaaagaggtctcaaactcttttggtctagataccctttcatttactcaaccaaatctgacttagaatcggtgggaaagaaaggcttgtctgagacaccaacaaagcgaagtgatataccaaaaattggaaatgaaatgcatgcccaaatcacggtatgcgatagtgcacatgacctcaggtctgtatggggaggctgaacagttggggattctcttcccctttgccacaggtccctgttacggccaattaatgctgaaacgtccctatttgtcaaaggaaggagttgagctagtacttttctcttcgtcctaaagattaatgatcttgacatgcatcctaggttttctatgctagttgatatctataacgatatcacttgtcctgacctagaaaacacttttgaaggacattttgtagattgttgacctaacagactccctagggagttcctggaagggtgagggcccctctaaaggattgctggtcaacttccctttgcagcagaaaaagcctgggaacaagagagttttgccaaacttggtatggcccagagagagagagagacagagagactatcctccctagccttcctttagtattaagctgcaaagcccccaaatgccttatgtcattgttttgggcactttctagacttctgaggaaaaccccagaaccaaatttaccaagcgtcctattgcattcaaaatggatttaagttcagaagcaagggagggagtccaaagttgctagctggatcagtaacaggctcagtatctcatgcaaagcagcccgctcaccagaaaggatcttcaagcacaagcgacacagctgctgcccgcagatgcaccggggggcaaaagctggcttcctcggggaattagtgctgttgtaaagaaggcagactgaagctcattatggtataagagtaggtgcctctgacggcccgcctgcacctgcgatccagctggcctggctttgtggccaccagttgctggctggagtggcctgcaggcactgaaggaaaatggaagcagctcatttccccaacacggagactcattccactgactgcagtgcctacggcctgtgctccaagtgattctaatcaaagacttctgactccgagagatggttcctgatgaggtctgaaccctgagctctggagggaaatgaagtctaataagggctggaaccgtttccaagactcagtaaggggtgcaattctcaccaacccgattcaactaacatttctggagctgctgccgctggcacatataaagtaggcaaatggtgacagccaagggccttgctatggagatgtgagacctaccactgctctgtgccaccgtgcgaagaacacaggatgggaatcggagctggtaaagctgcagcagtctcgctggcagatcttgagcaacctcttccatctctgctgggaggcctcaattgcttcatctctaaaacacggaagttggaccagatggtctccaagggctttcatatatacatatatatagcctaatacttaataattcttttttttttttttagacagtcttgctgtgtcacccaggctggagtgcagtggcgtgatctcggctcactgcaacctaagccttccaggttcaagcgattctcctccctcagcctcccaattagctgggattacaggcacctatcaccacgcctggctaatttttgtatttttagtagacacggggtttca[141 bp omitted]ggacatgccattttaataggagaaaaaaagtcacattcaagtgtagacatgggcatcatgtctaggaggcatctgactgttcctgaaacgtgggctgtgccccaaacaccaaggatcctgccttactgcacccaggattctgtgcttccacctctcaccacactgagttctgtcctgatgcgtccacctcttccctgtcactcctccgagccacgtgagtggtcttagctctatttgcctagcaactggatttctgccctggaatcctgggcttctgtctctgcatcaccctggatgcaccaaaggcgggttccagtggaatttttctgggcctgttagcagttagcacttctggctgactgctcacattacacccctaacacacagcccacttcagcttgggggcagcccaccaacagcctctgcaccccacacgccctcttcccaagagcttgacttcggctcttcccagctccttgcatgcccttcagtgttcttcttctctgctactccctccacccccatgaagcacccaaccacgatccacacacaggcctgccagaactccctgtgccctacagtcagacccaaggcagccacaccttggtcagaacttgagtgattggtctgggttcctcacagcagcaaatctccaagtgtggcccccgcacgggcagcatgaagttctctgggatctggctatcaatgcagagccccaggtcctgccccagcaccggatcttacattttaaaggttcccgggtagttcagatgcacgttaacctttgagaagcactgctgtggacggtcctaggtcaactaacccgttagagatgctcctggataacaagcaccatctcccttcccctggcactgtgggaacaggaagccatgccagaatcagagatgctgatgggcccagggaggtgggagagcatatcctggagggagaccatgtaccaaaacaggccagcctttccatgcaacctggacctctcacagctgtacagagcctcaagagagtgatcaccactctcttggaggtcctcctttgcaaagaaagaagatggatgcgtaacttctgggggtggaaagattggtgaaacaaggctgttgtactgctaagtatcagaagagcttccatcatcactgttgcagcctccaccaccaagctggaaagatgtctcagccaagcctggaagcacagtgcattactgggcaggtacttctgctagggagccatgaccccaggagctcccacttaccttcataaagttttatagtcctcaaatggcttttgccttacaatgccccagctagaactgggccgtggggtaaaagccagataggtgggtagaatccaagtttcttacttggaaaaagttacatggaggaagcaaggtttggactccattaaaatcacatcaccactctgcttctccatcacacagctccaactacgaaactgctccccaggtaactaggggagccaagacttcctttctctccaagacatccttcataaatctttctcctcctcccatccgcttttcctgatctctcacacaatgacccacgtcttttttttttttcctccctgctcatgccttggatctgtgaaaggtgccccctagcacacagggtccccagaccaccacagctcagcagttagaccccaaatctcagttttcagagctgcctctttaccatggcacagtcattttagaaacatgcagagaaaagcaaactggagcatacatctgcaggcaagaaaaatcaattcttaccatcagagaacagctaaccttctctgggggctgctacctcagaggagagtcttgggtcctgcctgaagccctcagactcagcaccaagactccgccggcttcctcttcatggcagcctctccgggaaatggggctgaggcaagtcgctagcccagggccagtgttctgggcaccccagcggaggttcctgtggctttgctcattgctgttctttcacaaagaacccactacattgcatagttccttccaaatccgctccagtgcttgctgggaaattaacaacttgttctggactttccagatgcaatgtttctggaggcctttctttttttcccactctccctctttttcccctttctcagctaaaaaacgttggctgaggtcacaacaaacaatggccaagcttgtgtcactgagcagatgcctcccacccccaggcctgtggacaagggcagctttgtccactgtgttttaggcgggacttcctgggcctgcccaagccctgctggagaatgttttggccaacttcctcccaaccctaagtcacagctctggtcctggccccggccccggccccagctgtgtgaacccaaggccagataaaaaccaacataaaaagaacggagaatgttcccccaaagaaccactgtgtggaaagctggtgcctccagaggggcgagatgaaggtctcttgccttcactctgccctcgccaccatcaaacctggacagataacgaacaaagacaggctcatgtgaggtctccactgaaaggggcctgaggatcacaaagtcattagttacaagtggagaaaggattggaccccaagagcaatactgcagccaccaactaaatgagcttgggcagggcttggatccttcatgaatatatcctatcactccgtttagaaaggtttttggagcagctgactatttagcactcaaaatgccgcatatttctgtgtttgctttcagatgcaaacctttggggttttaggaactgattctttatatagaattaaatatggttttctagagaaaccaagatcctgaggaccgagtggttccctattaagcaaatggataaacttatttatgaagaggtttcaatgccagctccttgggtcgggggaagaaaataagtacaatcgtctaaggatggagtcagaccagagctaagctgttgttttactacatactagctccaagaccctgggcaacggctccagcttcaatttctccaagtgtaaaatgcagatgatcacagtatctttctcaaaagattgctgtgagagattaaagggggtgggggtggggcatccatgtaaacatttcacctagtggacgaagtaaatgctcaatgaaagctaggatttttgttgttactatcaccagtggctgaaaggtaggcactgcagttaccccgggtccaaaaagagtccagactgaacaataaaaagcaaacagcccaatttaaaaaaatgagcaaaagatattcctccaaagaagatataaaaatgaccaataagcacatttaaagatgctcaatatcactaatcatgagggaaatgcaaatcaaaactacagtgagatattagctcacacccattaggacaggttcttaaaaaaaaaaaaccagacaaggccaggcacaatggctcatgcctgtaatcccagcactgtgggaggccaagacgggtggatcacttgaggccaggagttcaagaccaacccggccaacgtggtgataccccgtctctactaaaaatacaaaaattagccagtcgtggtggtgtatacctgtagtcccagctacttgggaggctgaggcaggagaatccaggaggcggagggtgcagtgagctaggatcacaccactctcactccagcctgggcaacggagcaaggctctgtctcaaaacaaacaaataaacaaatatcaacaaaacagaaaagaacaggtactagtaaggattgagaactgttggaacccttgtgcccttctggtgggaatgtaaaatagtacagcccctgtggaaaatagtgtgttaattcttcaaaaaaattaaacaaagaattgccatatggtccagcaattccattaataggtatataccaaaaagaactgaaagcagagtcctgaagggagggtcttgctgcctgttcatggcaacattattcacaagagccagaaggtggaaacaatgcaagtcgtagtaaaataaacacaatagaatattactcagccttaagaaggaaggaattttttttttttttttttttttgagacgaagtcttgctctgtcacccaagctggagtgcagtggcgcaatctcggctcactgcaagctccgcctcctgggttcaagcgattctcctgcttcagcctcccaagtagctgggactacaggtgcgcaccaccatgcctggctaattggaaggaaattttgacatatgcaaccatgtggatggaccttaaggacattatgctcagtgcaacagccagacacaaagggacaaataccatttgcttcacttctatgaggcacctagagaagtcaaattaatagcgacaggttgcagaatggaggtgaccaggtgctgtgggcagggaatgatgggaagtttgtgtttaatgggtccagagtgtcactggtgcaagatggaagcattctggagattaatggtggtgatgatggctgcacaaacacgtgggtatactcaaagccactgaactatacatttaaaactgatggagatggtggatttcatgtcatgcatattttgccatgattaaaaaaaaaaagcccccaagacccacagagatagtttagatcaaaagaccctgtgacccataagccgcttcatgagatacaccacctcaggctctccatgtacacccagagggaagctgccccagcctcttggcaatggtgaagagaaagcccacctagaagatgagggtgggaccagggacggtggctcacgtctgtaatcccaacactttggaaggctgaggtaggtggatcatttgaggtcaggagttcgagaccagcctggccaacatggcgaaaacccatctctactaaaaatacaaaaaattggctaggcatggtggcgggcgcctgtaatcccagctactcaggaggctgaggcaggagaattacttgaacccgggaggcagaggttgtagtgagccaagatcatgccactgcactccaacctggacgtcagagtgagaccctgtctcaaaaataaataaataaataaagacgacgaggctggccacctatagcaggactcactcaccatggctcgtcttgcgttcaatcttggggagaccgaggtgacacagccagcatcctaatgtcaatcgagggattttccgtttaggggtgtggcaccctctggggctcccagagggggtgacaatgtgcctttcccttggacatatcaattccttctgtgtccgcatcccaccttcctggtcttttctcttacatgcctgacagcagggcccatctcttccttcctaaagttactgacgtggctgctggggggactcttcctccctctctaattgctgggtttcaatctgctgcaggagtggctgtgaggatcttgtactgagcactcactttggaccaggcgctgttctatgcttcacatgtttcatgtcacttaatccctctaacaaaccaaaaaggaaaattctatgatcgccctcatttaacagaggaaaacagaggctcctgcgagagattgggcaggatgggtcagaagaacaagccacaggggcaatattctaggccatggggccagcctgagccaaggtgagagagaaaccgtgtgggtagaggctgtgggggaaaagcaggtggatccattcattagagtttaagaggcatgggaggtgagaaatatagtagtgaaggatggcatcagatcatgggaggccatgaggacaccaagaactaagaaatttcgattctataaaggagaagaaaccatcagtggattctgagccagggagaagtcacaatcagggctgtgctttgtagaaatcatcatgataccagggtataaaaaggtcaaatgtgagggagaaactagagggaggaaaccggctatagaatcccccccaccttctttctctctcccccctctcacccatcataaaaacaagagaaaggcaatgctcaagcctacacttgcaaaatggtcccaaaccagccatgaagaggaggcaagagcatcacatccagcggtggggagtcccccaccggcagctgagttatttgcatcttctctctgcagtgtgggaggagaggccgggtgacgaatccacacactcgcttttgaggtcagacatgctacagaaatagacaggaccaagatacttttctgttcttggagatgggctctcacccataagaaggtaaaagcgggccgggcacggtggctcacacctgtaatcccaacactttgggaggccgaggcaggtggatgacctgaggtcaggagtttgagactagcatggccaacatggcaaaaccccacctctactaaaaatacaaaaattagccaggcgtggtggtgtgcgcctgtaatcccagctaccagggaggctgagacaggagaattgcttgaactcaggaggcagaggttgcagtgagccaagatcgtgcagctgcactccggcctgagtgacagagcaagactgcctaaaaaaaaaaaaaaaaaagaagaaggtaaaagcaaaacttcatttgaacctagatggccaagaccttcaccttcagtccttacaggtttgtgaaattaaaatggccatgaaagctttcatagcctgtgactcctcagttttgtaacagcaaagaggggacagttttgatgctgttaaacattaacagccgtctccgacaccactttgacattgcatcacacagacgaacagatacaatcacagacaacaatgcatcactccaggcaacacacagaaatcactgtcattgcaaatcccagtagggcccccagccaagggcaagggacctttccgggccattacaaaccaggaggctgatctgctgtggcctgacctcagcagaacacactagtcctgcagacatttaattctttaggattccccaaagttaatctctcagagtatggaagactcacgaatacattctaagggtttactgtttgggttcatcctagcatctcaatccagaagtcactttggttttcctttattaaccatccttagtgattagcgttggccgtgaaaaacacgctactggtctctccttgtggcctctgcaaatagataggttgctacatatgaagccacacacacgaacggcagacagcagagaatccgtgatcccaaagcaaaaagactgatgatatttccaccaacctgagttttcctgagttcaacggcatcagataagaccaaccctcttattatttttttcgtttcagtcaagttgaaaactgtcaaccaaaataggccttatttgctgtaggcccttgtcctctgtaggatgaattgggttgtcttaaaatgataattaataggccgagcacggtggctcatgcctgtaatcctagcacgttgggaagccaagacgggcagatcatgaggtcacgagttcaaaaccagcctggccaatattgtgaaatcctgtctctattaaaaatacgaaaattagctgggcgtggtggcacgtgcctgtagtcccagctacttgggaagctgaggcagtagaatcacttgaacctgggaggcagaggttgcagtgagctgagatagtgccaccgcactccggcctgggtgacagagcgagactccgtcaaaaaaaaaaaaaaaaaaaaaaagataattaataagaaaacacatctgggtagggtgatgactcacttttgtaactgcttcacagtcatgaacggaaaaattattcatcagcccaagcagtctctagggtacagggtctcagggacgcccccttcctccatacgtggccccctgtctgcatgatcaatcaaccaactaatagttactaactaccctttcctgaatcctgtgtgggatgcaggcaggtattgtatgtaggacctgactcctaaaattcggaagctaagtcgcaaacatgggcaaaaaaaaggaataagtatcaaaggagtcttcaacagtgccaaatgctatgtgataagctggcagacaataagagctttcagaatccagaggagggcgaggtcactcttggctgggatggtacagggaggcttcccaaaagataaagaacttgcctcacagcagggataaaaaacaagggcttgactggagcccgaggaacatgatgtacgaagcagaataaggtttgataaaggacgggacataaggaaatgagagacagcgaagttgattcggaaggaaatgacagaagttcgaaccagtaactcgaagagatgtggctatggtgacagccagtttagggggatgcagtagagtctgttgaccatggatccaagttcaaagtgttcggtggggagtaggggtgagtctggcccttggcacatggagctggagctggaggcatctgctcagagatggtggtgagatcctacaggctgacaaggagttcacagagaaagaaaggaccttgagctgaaccttggggcatgctcttgcttaagcagtgggagaagaattattctcccccagcatgcctcaggcccaatccctccctctcctgtgcctttcattagtgcatgcaacacccccagggcccctctccaagactttcaaaggcaagaaccaggtcttcatctttttcacctctaaccagactagtgctcaacactcaggggctacatggggaatgaacgatgtgagttctgagaatcaggcagagaaaccaaatgaagaggggggatacaagaagaaataagtacagctgacccttgaacaacacgagggtttagaggtgctaacccccatctccccatgtggttgaaaatctgtacctaacttttgactccctcaaaagttaactactaacaacctactgctgactagaagccttagcgataacctaaacagttgataaacatgtattctgtatgttatccatattacagactttattcctaaagtaagctagagaaaaataaaatgttaagaaaatcataaggggccgggcacagtagctcacacctataatcccaacaccttgggaggctgaagtgggaggatggcttgagcccaggagttcgagaccagcctgggcagtctggtgagtgagagcccatctctacaaaaataagtgaagataaaaaataaaaataaattaacctggcatggtgcatgcctgtagacccagctactaggcagactgaggcaagagtattcttgaaccctggaagttgaggctgtagtgagccaagattgctccactgcactccagcctgggcaacagagtgagaccctgtctctaaataaataaataaaatcataagaaagagaaaatacacctacagtactgtactgtatttactgatgccataagtttacatcatctgtttaaaagatgaaacctttgaaatggtggcagcagcagctgcagacgtcagtctacggtacctgacaagcaattgaactttttcttgtaatgtcaggacttttctctgcttctggggaatgctttcagcatcactagtggcacactctatgggtcccatggtgttattcgaggcttatggcattgcactaaacatgatgaaaaatacatagaacagtgagggcttacattttactgcgatacccaatttactggagtgatgaactgttcatccagggctgatcagcatcacatgacaagccgatgctctcaacacctgagctcactgcaataacaactaggggtggccatgaagttactacagtatatactatggctagttttatgcagttatgattaatactacatctttgcctttgtttacattttgcttaaatatgaatggtgccatacacagtctgagtgtttgtgtgggtaaaattttaaaaattttaactttctgtagatttgtatgtattttgtggtagtaaatgataaactagtatcgaatatattttatgtattcacggcatgtctaacattttctaaatttttttggtatttctagactaggtagtctgtcttcaatttttttcaaattatcacaaatctccaaaaatattttccaatatattaattgaaaagaatccacatataagtagatctgtgcagt[148 bp omitted]tccatctctactgaaaatacaaaaaattagctgggcatggtggtgggcacctgtaatcccagctactagggaggctgaggcaggagaatcacttcatcttggcagtgagcagagatcgtgccactgcactccagcccgggcgacagagcgagactccatctcaaaaaaaaaaaaaaaaaaaagtgtccaagtgagatgccaaagaaaatgctcgctgaatacagaaagggtgtgtctcatttatcttggaaagagaaatatggaagagtgatgggtgtagacttggatcacaggcacacaaggacctatgagcataggatgcaaagggaagcaagatctttagataagatgccattaaagaagagaacaagaaagaggacaggccatagactgtggctggctccagaccaagggctgtgctgggcagagggctcccgtgaggtgactgcagccagtttcttgtacatatcatggtagagtcctaggacccttataaaatttctatgtgtcccaccccataaaagattcctagtattggccgggtgtggtggctcacgcctgtaatcccagcattttgggaggccgaggcaggtggatcacctgaagtcaggagttcaaggccagcctggccaacatggtgaaaccccgtctctactaaaaatataaaaattagctgagtgtggtggtggtcgcctgtaatcccagctactcagcaggctgagacaggagaattgcttgaacccaggagacagagattgcagtgagctgagatcgcgccattgcactccagcctaggcgacagagtgagacgctatctcaaaaaaaattcccaagtatcaagtggacatatcagaaacggcacccagttgaaaaggcctccaaacagccctgattctaagagatcccacagcttggtttccccttcctgcagtcattcatatcccactgtgacaccttgttccatccatcactgtgtaccagccgcactattatttactcaatatttttttcgaactgacttatatcccactgaaatgtagtctggccctaagcaataatatctatgaaatcacagatttgatttggtttctttctactacacactaaaataaatataactttaaaactgtcatctccacatgatctaaaattatctcacggatccttagttggaaactcagcacactttgagaaacactgtctctggctacacatcaagtcaccatgcagcatccacaaagtggttctggagattcttttttttaatccagaaaactgaacttgaattctctactgactacgtccccacaacgacaggaacacggtacccggcgtgtgactgaatctctgggagattaagggcatggcaaaaggagatgcaggggacttccctgtaagaagcatctgacagctgccccaggacactgcctatcaaaccagcaataagaggaaaagaacaggaaataactcatccaatcttaaaaacaaaatccaaaaatgacaaacagaatcggaggaaaaaaaaaaaaactcgagaaccatgaggccaatgaaggaaatgcagaaaatcttgcaaaccgctgggcgcggtggctcacacctgtcatcccagcacactgcccgcctcggcgggcagatcatgaggtcaggagttccagaccagcctggccaatatagtgaaacctcgtctctactaaaaatacaaaaattagccaggcttgatggcgggcacctgtagtcccagctactcaggagtctgaggcaggagaattgcttgaacctgggagtcggaggttgcagtgagccgagatcacgccactgcactccagcctgggtgacagagcaagactctgtctcaaaaaaaaaaaaagaaaagaaaagaaagaaagaagagaaagaaagaaagaaaggaaggaaggaaggaaggaaggaaggaaggaaggaaggaaggaaggaaggaaggaaggaaagaaaagaaaagaaaaaagaaaagaaaaggaaaagaaaagaaaagaaaagaaaatcttgcaaaccaagatgagttgtaaaaggggaaataagacttcacaccttcaccactctctgcccataatctgagctgcacttcatgcctctgccactccatgtctctaatttgagatgcaggatttgcactgacctgaacactgagcagccagccctctcctctcagcacagatgctgtctgagaggactgcccatcatccatttaggtacagcaagtcccagaaaacaagagagcaggaagtgcagggtagaacaaggggcgtgggaggggtgctcactgttcggaaaggtacagatgctacaggccaagcccagccaatgccctggctgcagggcattgagaagagaccccaggaactgtgagttttcatgttctccatcaattcggagtatcagaggaccagatagtaacgtgacagttcaccaggcaaaggccaattcgaaaacagaaactggactgagagatgggtgcaccatcgaaccctacaggcaggtagctgtgaggggaagtcaaccttcccccaagccgacagtgtgccaaggctagtgacagtcgatactttctgttggtacatgccacgtttacatagatcctgccgtgtcaagaatgcataaagaggggaaatatgcaaaagcagggtgaggaaacaccatcctgaaagcacaaaggaagagcacgtctcagaaaatcattcagaagaaaaactgtcaggaaactgtcagaatgtaagaagctgtgatttctttgaaagaggaacagcaaatcataacaggaaaaaaaaagcagttcgaataaaaaggatgacaaagaagatagtggacgaggtgaggattatataaaaattgctcatttaaatccatatttagttgtagttgtgggtaactgcaaatataaacatttaaatcagtgacttgcggggctaacaggaaaagtgtccccaaattgcaaaggacaaaaagcaaggaaatcaagagtctatgtaacatatatgtttaaaaatattccattattaaagaccagaataggttaaacttaataaccaattgcaattaaaattatcaagtattaataaaattaataatgaattgcaaaaataatctaaaattacgcatataggccaggcgcggtgactcatgcctggaatcccagcactttgggagggtgaagcgggcagatcacttgaggtcaggagttcaaggctagcctggtgaacatggtgaaaccctgtctctactaaaaatacaaaaattagccaggcatggtggtgcgcacctgtaatcccagctacttgggaggctgaggcaggagaactgcttgaaccaaggaggcggaggttgcagagagcggtgatcgcgccattgcaacctcgcgccattgcagttgcgcctgggcgacaaagctaaactccatctcaaaacaacaacaacaaaaaatcattcatataaacaggcaaaaagagaaagggttacccaggaaatcagattttcctcagacttctcctctaccctccctaccaatggctagagagctctttctactagaataaaagctccatacagcagggattttgttttgctcactgctctatcacggtgcatacagggcctggcatcaccccttggaaagtgctagaagacaaaccccactgagtttaaagcttcacggggtacagtcattgttatgtccattgctgtgggtattcaataaatatttgctgaagctaaactgcaaatgtgaatttttacccaaaactttgtaattcaagacatacaaatccatcaagttgtatgagtatttcaagtgaaagaaataggaaggttctgttagaggcatgcaagtgaagacaccatctccttaccctccaggcactgagagagaaaattaggaagacaacacagccatggggaagtaataatacaaatacaatgcatatgtaagtcatttcttgctcagtacaaactcccaatgcaaaaatccagagaactgtgtgctgcctggtggattttccagctcattgcgggggggaagattagtgccttagtatttcattcacctccttttctgctcctgtccatcccagaaccaggatacgagtttctcctacaaggccagtgcagatgaagcaatgggccatgtgtgaggagcacgcataactgatgttccctttctgtccaggcgcataccaacaatgaggactattcaagctttagggacactctgctgggaggatccagaaacaagaagtctttgtttttcgtgtccaccaaagcaacactgtgctatgtaaggcaccacagtggccattttcttcgccgtggaacttcagtctttattttctgcatgttaaaaactcatattgaatggaccaagtcttgttttcttccttaatttgggtaagaccaataaaccaccccatggcaatgctttctgtcatcaaagccctctttatatcatcctccctctaaaagctgtccctgctttagaaatcaaagtatgcagtatgatctcaatatggaaaatagcactccctcacccaaatgaagtactaaagaaagacacagacacattaacaaagcttatctttgtattgggggattctccggttgtttcaattctatttctttcaccaattttaaaattttactttatttaaaaatat[175 bp omitted]gcctcccgagtagctgggactacaggtgcctgccaccacgcccagctaattttttgtattcttagtagagacagggtttcaccatgttggccaggctggtctggaactcccaaccttgtgatccacccaccttggcgtcccaaagtgttgggattacaggcgtgagccaccgcgcccggtctgaaattagttttacaatcagcaaatcatcatatacaatcctaaatatactatatgatcccaattgtggagaaaaatatacacaacataaaaaagaatgcccctaattattttcttatttctgtttttctatattttccatgttttctataatgagcatattaattttaatgccttttaaaaattctaagcttattttctattatcagctagtacatgaatatcaccttactaaaattatttaaacaagtccaataaaaccctccttgacatatcccatcacatttgacatcccctaaaatgagtactatttatcaggtagggtttattgtattatctttcaaatggcaagacagttggtggggtgggggggctttatctttaagaaaacagagacaaaatgactttctcaaccaatgcaacgctaacacaaaaattagagacagaaggcaccttagtaatcatctgatcacatctcatcattttacagatggacaaactgaggcctggagacagagcttggacaccgagtctccccagtacccacacagagccctctccttgccctctgcccaccctaaacctgggtgcagatgtcacccccatgactagagggctagcacatggtcagatggcacagcagaaccaaggccccattcaggaccactccccaagatgacctccacactgctggaaaaggtgaccctctccatcaggcccagctctcttctcctgaagcacaagctacttcccgtctgttagcagccaggcaaaccccacgaaaggaagggcccagggaggaaacatctgtgtatacacgaggggtgaagtcataagccctcttgactttcccttttggcaaatcctcttctgcctaattttttttcccctacatcattgagatgcaaagctccattcaaacaagggggcctggaagactccagcagcttctagaaaccaaaacttccattctgctacagagattctcaaaagaaggtatgtcttgttgcactggggtgtgggtggggctaagaacagaagatagatgccctgcaaaccactcagttgaccacagacatccatgtgcttacccctaaacccagcttctgcccttcagccaagcagagaggaagctcaaatgcaggttccacagcttctcagccatataaccctggccaaggcacttcacctctacaaacctcatcttttttctttcccacataggaaaatgcagatgccaccacctacttcatagaatttttgcagggattaaataagacagtagaaacaatggtaggtacatattagcttcatcccatacttttccatccccttgagaaaagccatcaactgaggtcaccaacgctgagtcactcatgttgcccggactttcccaacagcacggctaaactctccagaatgataccttctaaccattctgacataaactgagctgactgaaggaaagagcacgtgaatgacgagactagaattcaaagaaacatcagaataggttctcatcaatggctttgcgggcctagagccctccaagtaaatacatttggaaaagacgtggtttcttggctcgcatggactgtcccctaaagtaactaaagccattagacaaagagaaagctgaaggagaccctgccagtaaaactcacagggcggagaacacacgcaagtccacgagggctacaaccatacaaagctgctggggtaaatgaaaacaagacccagaaacaaacatggtccttgaccaagaactgcaaacaaaccagtgcaagaccctggcaaacttctgaaaatggcctcatgtgccttcatttgaacatgggcaagggcactccaagaaaatttcgtaccccagatcgatcgctcaagctcccaaaaatgagacaggctggataacaggcaggaaaaacgggttaagtttccctttttccccagcattggatatcccccaaatcacattcactgcctttatctcaccattagatcttatctttttgttgtttttagtagctaaaggactactgtggaccagtaacttgatatacagtagtttatttgacccttataaaaaccctgggagggaagtatttattttcattttataatcgggctagcttgaacccagtagtctgtctccaagactggtgctagttccatctcaccccacactgtcccccgattcctccatttacaatcatagaaagctgatgggctgaatgaaaacgagccccagaaacaaacctggtccctgaccgagaactgcaaaaggcagttcccaaaacactttcccatcatacctgagactcctctgcggcgtctaggaatccaatatccaaaggcaaatactccagggttgaagttacagtcgaagccatgacctgccaaggccttgatcatcaactgtcaaattgataatcaggtagaaggtaacaggagattgccagtgggaagcctcattaactagtgggaggggtcccagcggggagaaacaggtctaagagggtgggtaggaaactaccaagagaagcatctccacagcaaagagccgtgaccagcaccctcgagtgaaatgacaccctagaaggatgccaactgagtgccacacactgcgtagctgtgagcagttttgtttttcagctggcagagctgggagtcccagaaggcaccccctgcccacccatgcaaagcaagtaagcggcacaggctgccagaggctccgtcctcaccctcacgcactcacgctcagtcaccagaaagcccctctcgtgtaggctgaattctgggagcttgagttcaactctccagcccagaaggggaaccaccttgctctgtctagtgggccaggctcctcactttggggctttctcctgggcaatttagcccctgcccctgcccagcttctcctcccccgtgcacagccacacctcacccccacagcggctctcctttgggtggcctgagataagcggccttcatcccttactcatgggagctccttgagaacaacaatagtgtcatactcaaatccatccccaggcacagaaaatgtacacaataaacacacattggctacatggagttcttcctggtctctgagtagggttttcagctcacctagaaagtgggtttcttactttcctgtggtcacccaggcagcaaggtggaggaagagagggaaacaagaaggcagagatgaaagcactacccacacatttatctattttaccctaggaggagtctgggctacttaaatgctctcaggggtccccaaaccacaaatgaataaaatggaccaaggggaaaagatcaacaacggcttcgcgagcctggggccctccaagtaaatacatttggaaaagacgtggtttcttggctcacgtgcactgcccactaaagtaactaaagccattagagagaaagctgaaggaggccaagtgatcttctatgaaaacagcagtctgagttaccaatgctagatctgaaatgtacatgtgtggctggctctttacctacatgattttaaagaactggcatattttcacccaaggacccccagcgcctgaatgcctggtcaccctggagaagcccttgtttgtagggtcacacaccaccagccccatgggaagggagcccaggaaccatctctccagaacagttgaaggcaccaggtctcttcatcgatgtggcatctgtggagcccacagatgcaagtgctgaatcgtctagaaaaaacgggactgagatttgctgagatctcaaaatctggaagaactcctccagccctctccgcaggtaccgactctgcctggaggggcacggcagtgagatccttaactcctctttggctagggagcctcacctctctcccccatgggtcttaaaaggagaggagaaagtgacaataagaggtgctggcgtcctatccatcccctgagcatcagagcggtgattctcaagcttcagcatgcatcagaagggctgttaggacacagtctgccgggcccaccctccaagcttctggatccgtaggtttgggtaccatccaactatctgaatttctcacaagcccccaactgatgcagctgttgcacacgtaggcactccactttgagaatcactagtttcaagagaaaaacaaagacggtctgttctaaatcgacctctggacctagaagattaatctttaggaaacataaattcactttcagaaagaaagagactcttttaacttttttttttttgaaaagcatggccctcttactttccttcttttcatagacatgggtgcggggaatatttcctgctttccctaaccataagaaaaggaatccaaatgaaatgaataatggcaactgttccactattggccttagcgctggtaacagcagagatgggtggagactgcgcaaattggaaacccactacttatcatcagcatattgttgccaagcagggcggcaggcttggtgttgctagagcatctcgtttttgcaagagaagctggaaatctggatttttaatggaaaacctgcagattttaagatgttggcaaccaactgaaacatttttaagtgaaaccatgggcaaccaaaaacaaaacaaccactaaaaaccccccatgattctgtatttgattttgcacaccggctaccagtgtgcaacccctgattgtaactgtcgggggcctttataagcagtcgtttgaagagggggttccctggttctaacgaattgaataccacccaccttagactaaagtaccaatcagcacgtctgctccataccacacatccttttagccaggacctcttacactggtgggtgcagctggatgccagcttccacgggatctgtgaaccccttccaagggctgcaaatgtgtggcctgctcccacccacccgagaactgggctccctgagcctgggcctaaccttctttggaaaggaagcacaagacaagattcctgaggcagaagggaccctggaaagcctgtcctactcagtctctggaaagaggagcagcccatcagctgagaaggtttggaagtggaggaggtgcgtaagaaagctgaaacaggttaaggaatgaggcaaacaccaccaggagaaagcagtcaggggcgacaccacacatcaagcaggctgatagaagagcaggaatttgggaacggaggaggaagccagccaggcacagtggcctggggtaggatagtgcacatcctcaggtctgaatgtgaaatgacacagccatcatggtgagcagagagatgcccatgggtagcaagcccaagcgctggaagctagcacctgggaacatggggcatggtgggaaggaaggttggatccatgcctcgtgggagatgtaaggtacccaaacctgcagaggtagggagagtaggaacatgtgctctggggccgctgggaagaatgcacggtgatgtggccataggcatcctcactctgcccacagaagctgtcccctggcggacctcaggccctggccacctccctgttcccagacttcctgctttccagttggcttgttcatccctgtctgtaccgcactgcacatcagcttcccaaaatgacgttgcatcctgatccccaccccactgaaaacccgtcccctccctttccaggttggccaggttttcccccacaaggaaatcagcagccatctcccggagacagtccaggcccattcagccaccgctggaggccagcagttttcaaactttattttcaaagtctggttcacaataaaaaacacattttacttcacaactcaatatacaaaaacaaagcaaaagtttcatggaacaatgcttgcccttgccacacataacgcgctctgatatttttccgctctggtttttgtgcaggttgacactgattgcttgcattgtgtgactcatgatgtatggtttggaaaacaatgctttacctggtcccaatctccatttttagaatctctttttttaactccatctcaatcaacaacccctataaaggattccttcatgatactttctttgacccgccaggtagaagtgaattatccccaattctgaatctcccagcccctgcagactgtatatcattcacgggcacttagatgatagtcatataatttttctcttttctagaacagtgtccaatgtccgggtgcagtggttgatatctataatcccagcactttgagatcgcttgagttaaggagtttgagaccagtctgggcaacatagtgagacccccatctctacaaaaaatgtaaacattagccaggcatggtggtgtgtgcctgtagtcccagctacttgagaggctgaggtgggaagactgcttgagcccaggagttcgaaaccagcctgggcaacaaagtgacagcctgtctctacaaaaacttttaaaattagccaggcatgatggtgcacacctgtagtcccagctactcaggaggccgaggtgggaggatcgcttgagcccagaaattcaaggctgcaatgaactatgagcatgccactgcacttcaggctggggaacagagtgagactctgactctggaaaaaataagcaaataaaaaataaaaataaattaaaaaaaaaagaacaaggtc[220 bp omitted]gatctccctctccctctctttccacggtctccctctccctctctttccacggtctccctctgatgccgagccgaagctagactgtactgccgccatctcgactcactgcaacctccctgcctgattctcctgcctcagcctgccaagtgcctgggattgcaggcgcgcgccaccacgcctgactggttttcatatttttttttttggtggagacggggtttcgctgtgttggccaggctggtctccagctcctaaccgcgagtgatctgccagcctcggcctcccgaggtgccgtgattgcagacggagtctcgttcactcagtgctcaatgttgcccaggctggagtgcagtggcgtgatctcggcttgctacaacctccacctcccagccgcctgccttggcctcccaaagtgcccagattgcagcctctgcctggccgccagcccgtctaggaagtgaggagcgtctctgcctggcagcccatcatctgggatgtgaggagcccctctgcccggctgcccagtctgggaagtgaggagcgcctcttcccagctgccatcccatctaggaagtgaggagcctctctgcccggccccccatcgtctgagatgtggggagcgcctctgccctgccgccccgtctggaatgtggggagcgcctctgccgggccgcgaccccgtctgggaggtgaggagcgtctctacccggccgccccatctgagaagtgaggagcccctccgcccggcagccgccccatctgggaagtgaggagcatctccacccggcagccgccccgtcagggagggaggtggggggcagcccccgcccggccagccgccccgtctgggagggaggtggggagcagcccccgccccgccagccgccccgtccgggaggtggggggcgcctctgcctggccgccccttctgggaagtgaggagcccctctgcctggccaccgccccgtctggaaggtgtacccagcagctcactgagaacgggccatgatgacgatgggggttttgtcgaatagaaaagggggaaatgtggggaaaagatagagaaatcagattgttgctgtgtctgtgtagaaagaagtagacataggagactccattttgttctgtactaagaaaaattcttctgccttgggatgctgttaatctatggccttacccccaaccccgtgctctctgaaacatgtgctgtgtccactcagggttaaatggattaagggcagtgcaagatgtgctttgttaaacagatgcttgaaggcagcatgcttgttaagagtcatcaccactccctaatctcaagtacccagggacacaaacactgcggaaggccgcagggtcctctgcctaggaaaaccagagacccttgttcacttgtttatctgctgaccttccctccactattgtcctatgaccctgccaaatctcccaatgcgagaaatacccaagaatgatcaataaatactaaaaacaaaaacaaaaacaaaaacaaaacaaaacaaagcaaacaaaaaaaaattagccaggtgtggtggcaggtgcctgtagtccaagctactcaggaggctgaggcaagagaatggcgtgaacccagaggcggagcttgcagtaaaccgaaatcacgccactgcactccagcctgggctacagagcgagactccgtctcaaaaaaaaaaaaaaaatctgtcaaatgtttgatgttataggagaagcccgaatgacatattctgacagcaataaaattgtactacatttcacaccatactgatcagaggagccgtctgaagaactccatcttcggacaactcctctggctgggccagtgttctgataccggtgccatcctctcccagactcaggagaacagagctgtggcctgctatggtgagatgccttatagtttgcaacccactctgctctcagacacatcacacccctatcacagtcctcaataggttcacactggccgtaacattgactcattgcaatgccaggggaagatatttagcacatcttgaggttaggtggggaaatagagcctcagaaaagttgacaaaatggtcacacaggtagaaagtggctgaatccacgcaaatccaagttttgtagattcaaacttccatgctctttccagaggccgatccagatcaagttatacaatcctgtgttcattacacgtctccggcttgcaaaaccagaaaggaacatcagggtatgctgtccacgctgtatcccctttcactgttgtgtacacccacacgctgcctggtcccatgacagaatgcgcacaaacgtggcatgcatgagtaagtcagaagaccagtgtggacctggtttcccatcccactttccccagggcagctgtgtgacatctggcagagcgtgtcacctctctgagcatctccctcatctagaacctgggggaactgtatctgctggttcccaagggccttttcaggcttctcctgagaactctattatgctacttggagccacgtggcctctacaaattctcgctacactggggaattaagaaaaggcaaactgaggaggagaagatccaaaacaggaaactgaggtaaatccccggaaatcaagaaaaactcacttcccacagagctcatctcagatacttcccctgcccaagtggctttctcttctttccagacccttgggtcatggtgcgacccagactcactggatgcatgaggaggactgatacacgggaagacagaagaatcccccaaatcccccccagagcagagccaaaccctagccaagcaagaggtcatccaaggaagatttctcctcctgcaggagtggcggctgcctcgcactcaacctggtccaattagcttcgagcatctgcatcaaagataaccagcagagccctggttccaactcacctcagccttgtggtgtgtccttatgcaaatctgacacgctggtcattttctgccaccatccccacatccgctgcttccccgtggcatcggctaattcactgtgcaaagcagcatttatatatagaaagttgcagccacgcaggttagcattaaaatagagacttgacgttgccgtggcaaccaaacaaatgatattcaaaatgaaagagaagtattctgcaatcgggaaagcatgtccacagccttccagggcagctgggccctttccccctgagggtgggtgggatgcctctggagaagtgcctggtcctgatgaacctccacctccccattaggtcacccactctgctttcagcagcagccatcatcccctgcacatgctccttccggtctagagtggacccaaggccaagacactgagggagtgtgataatccaaccaggtagagcaatttgcaaaaactctactccttaaagcgccgaggagaagcagccctggtgctttagtaagggtgcttctggaaacaaggctggccttctgccactgcctgccataacgaagagtcgagaggccaccagctagccgagtgacactgggcaggcttctgtacctctctgagcttccagcttaaaatgagctgggagtgggaggagggagcagcagcgcagggtcttcaacctcatgactccgggatgtgcaacttttccctgctaccaccacctcctttttctacattcctcttggatattgctgaagccccagggccagacagaagttactgattcccaggtctggcacatggaataaccctgtcactttcattctgtacacctggccaccacccagaaagcccgcagtccccaagacagaatgcctagattctggtcttcaaggagctaggggccttgaacaaatcttggacctttctggggctcatttctaaatgtcaaaatcaagtgttatctagaaagactgaaattaaaaagaatgacaataccaagtgccgacaaggatgcagagcaactggaattctcacacgttgctcgtgcgaacacaaaatggtatggtccttctgcagagcagtgtggcagtttcctgtaacattaaacatacatttaccatgtggcccagcgatcccacatgtagcctgtgtttctgaaccaggggcgactttgtcccccctgaggacatttggcaagccttggacacatttatgggttgtcatgacggaggtgggagaggctgagtgagtgcattagctccctgcagagacctctgttgtttccaaagagacacctagaaccaagagtatctctgacctaagctgagggctagagagtggccttggctgtgcaaatccaccgaaggctctgtaaatggtctcccttctgacccagcccaagctcctaagccaggaccaaaactgactgtgccaatctgcttccctctcctggagcagttcccaaaccaaatgcaaacctcatggttgccccactgaaccctggaagaacacaacttcctacttacccagaacaacaacttcaaagccactttgcgtggttgctggctccgaagccacacagagatgacggattacaaggaagaaatcagaaccatatggatttcatattcagcaaaataaacagaattacagcattggggttgggctcaagaaaccaggggactgtgtgtttggcccagagcccaggcttggtggcccccagcatgggctgggctctcctggcctctcctccccacccatgactcccacaaacagcgccaggggcgtccagcctgctgtctgcccctccttgccaaggccccagcaagcaatcctgcttcggctgacattttcgtgttttattgagtttttttatatcctcttttatggcacagttgaagatagttcagcttcttttctagcttcgtccaaagatgcacacaagcaccgacaggaatgcggtgtcgttaatgacagtgtgacagctctggagcctctggggggaagctgtaggaaggggcagctgtggcacccaccccctttcaggcccctggttcatttctcccacagcgaactgtgctgggcgttcccactcccagcctccctctcaggccagaacagaggaactctttcctctcctggtttctaggggaacaatatggcactccatgtgtagcctgtgtttctgaactaggggcgctttttccccaggggccaatggggcaatacttggtgacatttactggccaaggacgctgctaaacactcaacaatgcacaggaccgccgcccacaacaaaacaaccatccaacccgaaatgtcaacagtaacatggccgaaaaccctggtacagacacactgaccaggcttcagttggttcccggtgcccccgacccaggtgcatgtccacggagggatcaagctcaggacttttagagatcacagacaagttctgacctacatgaaggaggaaatttaccattctggtaattactttaaagtaaattctaggctgggcacaatggttcatgcttgtaatcccagcactttgggaggccaaggcgggtggattacttgaggtcaggagttcaagaccagcctggccaacgtggcgaaacctcgtctctactaaaaatacacaaattagctaggcatggtggtgcacacgtgtaatctcgacaactcaggaggctgagacatgagaatcacttgaacccgggaggtggaggttgcagtgagccgagattgcgtcgctgcactccagcccaggcgacagagtgagactctgtctcaaaaataaaataaaatagaaaataaaataagttctacaactgatcgagatatcatttgatcttccaatgattctccatggatatagagaaaagttaaacaaactttaaaaacataaaacacatcttgcccatagaaaccacacgaacacagtgggcacagatcatttaaatatcctgatgtgaataactttaaataacacagctaattctgctttgctggtgggttgctttttggtctcagaaatccctgaaccagcaaatcagggctgctcacatccctattctctccctttcctttcttctctcccccaggagtgctgagccaccattagctgacactaattcctaatgaccctgcagatctcagctcccaccgcaaatgccctctcaccccccaggatcctgtgggtagccgagcagtcctgcaccacgtgagtgaggcctgcagtacttggggcagcccaggggaaggcagggatgtccagggagctccatccacactgtgcagacatcagggggcacacagtaggatggacccctccccacagcaaaggcaacccttgcctcgctctgtgctcccacttacctgctggctgggtttgccagagtgggccaagaaagggaagcagagtggctctgtggtggtttcatggggtttcccctagaggaacagacaggcagaacttgctaatgccacttctttgtcattcttgcaaaaggagttcctgctcctgcctacctccatcaaaataataggcaacggcatggtggcacctggcacgtgtgtgtgcgcgcgcacgcgtttgtgtgtctgtgtgtgtgtgtgcgtgcgcatgatactcacaaagacgtccccatgtcctacacctcaggaggaccccttccatcctgctctctctgctgaggaaacctcttatttaacttctcagttgcaatgatccaccattttctgccaaagctaccatctctgctccaaagcagagaagcagcagctccggcaaaaccctgacaaatcatctagtttctatgattatgcttattccagagaatgaattcaaggttcaaacagttcggcagtttgccccaggcaaactggggcagagtgcatacacttaaacagctaataatggcggtgccgagatcagggtgtcagggtgaggatctcatccaaggtcaggctgctaacaagatacgacactgagggctcagccctgcacatctggctctggaactcttaactcatcacctccactctaacctgttcaccacggcagcttcctgaccaccgtctagtatggctccaccctgggtcaccctccctggtcaaatgcttccttcaagacactcaggtcatgggcttccccttgcacgggtggtgaggggggcagaggaagcatctttttttcatccagccacagcagtttctttgttgcctcaatgcccctagtgagtcacctcctccaaaggccattgccaaagagagcaccattttagcacgagcgctcgtccccacttcccttttccatttcccaacatggccctcaccagctcgaacattagtcacacacgtgccaacagaagttcaaagatgctccgataatgtgatttgtaaacacgaagtcccagcagcggcggctgctgcagcttcttggctctctcactcaatcccctacaccttctggggcctcccagattgacgttttcatttcccgggctccacgacacgcagggactgtgagtctgcttttcacacgtgggagtctcgtgccagaggctggggcagaggaaaagcctcacagcatgatctggcatttccaagcacaccgtgggggtctgtgacctacaaagcacagcaggctctcgtagcatctgtatgctgtgtgggcctgcccagcaggccatacgtaccccggcttctgaaagaagcaccctgatttttctactgtggaaccacctcacctcattctcagccctcgaggtttccgggagcaagtggctcctgcctggccaattagcacgtgccctctccccaaccacggtactagttcacgaaggggcatattacccatctggggctggatacctggaatttggttttggaattactggggaaagatgtattactatgacaagatgcaagcctgaagctgctgatggtcacgctgacaactcgcagaagtctcactgagaatggagccaatgcagaaggaagagggctgatgaggaagacagggaatcagagatagagaaacatcagactgctgacactgtttgtttaagccacttgatcaaaccatgcctgaagctgaacttcctgggactgttccttttttgtctgaatccaatttgagtgggatttcttttcactggatctcgctctgtccccaggctgaagtacagtggtacaatcatagctcactgcagcctcaaactcctaggctcaagtgatcctcagcctctcaagtacctgggactacaggtgtgtgccaccacacctagtgaatttattttttatttatacagatgggggtctcactacgttgctgaggctggtctcaaactcctgggctcaagtgattcttttgccttgacctcccaaagagctgggattacaggtctaagcctgaataggatttctgtaacatttaatagaaagagtcctggctaatagttccttggtaaagggcaaggtatacagatagcaacaatcaaaactaaagaacataaagcagggagaatttagagatttggttcctttcttgagcctgcacttgtgggtaagcttctcttccaaagatatctgcatttctaaaaaccttcctttggccactataacacttggtgtcttaaagcaacagaaatgtattctctcacagttctggatgccaagcttccaaaaattagtatcactgagctgaaatcaaggtattgatagggccatactcctcccagagggtcaaggggagaactcagtccttgactctttcagctcctggtagccgctggcattccttggcttgtggctgcatcactcaaatcctacttccccaatcataccctttgtcttctatctacagtcaaatctccttcagcttctctcttataaagatgcttgtgattacatttagggcttactcagataacccaggaaaaccttctcaattcaagatccttaacgtcattgtacctgcaaagactcttttctaaataaaataacattcccaggttctggggattaggacgtagacaatcttggagagccactatcagctgccctcatcaggccaagttggaccatggatcagaaatgttgctgtcaatacctctgatgcttccccaggtcctcctggctgggacctctggggccaactgtgccagtcacataacactggaagaagaaatagccagaatgttggagctggactcagagtggaagatatgcaagagcacagagtgccagggaggttcagcaggattgggagccccaaaggaggtctatccggagctcaagttagggggctgtatgcttggggccaaaatgtaacttgaccttgagataagatgaagggaattacagtatacccctctccataaccccatttccccagtgaccagattgctatggcgtagggtaggaaggcaccatctgtagtggaaatgggagggagaggaaagtagggactgaagaagcacaagagagactgtgacaaggagccaaggccaggctaatttgtcgcccaagctggagtgcaatggcatgatctcggctcaccacaacctccgcctcccgggttcaagcgattctcctgcctcagcctcctgagtagctggaattacaggcatgcgtcaccacgcctagctaattttgtatttttaggagagatggggtttctccatgttggtcaggctggtctcaaactcccgacctcaggtgatccgcccgcctcggcctttcaaagagctgggattacaggtgtgagccaccacacccagcctggccagactacttttttttgttttgttttttgttttgcagagacagactcttgctatattgcccaggctggtcttgaacagctggcctcaggccatcccctcacctcagcctcccaaagcactgggattgcaggtgtgagccactgtgcctggcctacaaggtcaatttttttaaaaacagttaactgtttatttcaaggtctattaattaggaaaaaacatataagtagtttgaaagcctgagatgtgactgtcattctgcaggacatcaggacagcctttctctgcttggattggctcctggggtcactgaattttggagtcagggggagcatttctaggtcaccaagtcctgacagtgtagtggtgaagagagtagacttgggagccagactgcctgggttcaaatccatgctttcccaggacaagttgcttgatctagctggacaatctcaagtcagcaattcccgtgaagacaaaaaataataatgatgatgtaagtattaataataatacctgttacaaggatcaagtgagttaataatgtacacaaagcattaaaaattggcctctctttgctgacactgcaggcaagtgatagctccttctcccagctccatggttctgccatcctttacaaaaggctctgatgaaatatgggggagggatggggtggcgggagtggagtttccagcccaccacagcagaggctcctctgccttccattttattccaactcccttcacttcttcatgcagacaagtgtcccacttcttttttttgagatggagtctcgctctgttgcccaggctggagtgtagtggcgcgatctcggctcgctgcaacctccgcctcctgggttcaagtgattctcctacctcagcctcccaagtagctgggactataggcgcatgccaccacacctggctaatttttgtagttttagtagagacggggtttcaccatgttggccaggctggtctcgaactgctgaccttgtgatcttgcctcagcctcccaaagtgctgggattacaagtgcccgccaccacacctggccaagtgccccatttctgagcttacctcagccctatacccccaccccctctggctagggggtaatcagaaggaagaccaataggaccaatgctgaatacctgcctggtgattcacacagaataatcaggccaacctcaagctaggaatgtctgcaaacacctgtcctagtccccctacaccatgacagttctttgaaaatacatcccagacactctccattaaccctgcccagccctggttcagggtgggcctgatcggagaccatcaaccatctcctgtaagtctaaacagaggctcagaccgggagaaatagattcatacataactgaatcaggtccttcggaggaaagttgatatcaacattccttaaccttgacactaaccactgaggtgtggtcactgttacgttttgtaaagaatcggggtgtggcctctctgatattataggtccaaaccaatggtctctaccttggtcattcccatgaaaactattttgggattgtgctctgtccttcagaggcttaacacaaaccatacctgagacttcagccacacataaacacactccaatacttcctcccaaaccttttaagctgctttgtacgaagcacagtgacatcacacagcaccccaaagagggacaggcacccccatatgcacttgataggccggctcttcccagaagcatcatcaactccttcagggcgcttccctaagtttgatcctaggagaacttctgcggaacctttgctagaaagcccctgacccattgaaccaggatgacccactgacccagatgaagccctgggtttccttccctgacctgaaaacagaggcaggctatgctgggagttcccaaaaccaccctcagctctgatgtttcccagaaggactcatgggactcagcatatgttttacttctggtaaagacttatggccagacacagtagctcacacctgtaatcccagcactttgggaggctgaggcaggaggatcacttgaggccaggagttcaagaccagcctagacaacatagcaaaaccctgtctcttaaaaaaaaaaaaaaatcacaaaattagccaggcatggtggcacacgcctacagttccagcttctcgggaggctgagatggaaggattgcttgagcccaggagtttgaggctgcagtgagctaggatcgtaccactgcaatccagcctgggtgacagagtgagatcctgtctctattttttttttaagggtcttattacagcaaaaaaatacaaagcaaaatcagtgaagggacacagaacctgggacaaggtcctgagaaaaccaggcgcaagttcaggagtcctctcccagcagtcacataggatgtgcctaattcctccagcagtgagtcctggtagcatgtgtaaaacactgtctagcaggtaagctcattacagactcagtgcccagagtttttataaggagctggtcatgtaggcatcccctgcctagcacaaacatgaattgcagactccctgaagaaatccaggtattcagcacaaaccgtattactcacatgaacagtttagagaacagccacccttactattcagggaatagtgggagcccttcctaaatgcaagttcccagacaccagccaaggaacaatgttgccagcaggcctttctaaggagggctccccggcctgctacgttgactctctctgcaccatgtccgtggaatggttacttgaagggatttccccttttgtctgcccatccagtggcagaatcctgccactaaatcctcaacaggtgacaagcctctcaaacacttgtgcggacagagagctcactccctcacaaagcttcctcttccatgttggcctgtgatccttgctagtccaggaacaccagcctctgagttcagtatttcatgccaataaacacttcacataataaccaccactactatgatgttgggtcaggccttgggccaagcacatgacaagcatgagctcatttaatattaatgttttatgatggagtcaactatgccttagagacgcaaagcgacttgcccaaggtcacagtgttaatgggtttgaactgtggtccatttgaccccacagccggagaccctgaacctcccacacccagtatctcccgggagcctatctttcactgatcaccattctaattttcagcatactctcataccactttttcctcttatttgctaatatttttagttgactcacttttttcttttaaaaattgcactgaacagaaaattgatgtgagtctgtgaatggaaaactagtgacatttgccagaaatctataataaccataaaaataaccacaacaaacaccaagcaatgttattcaatctttgctggatactgctacctgctgaggcctgccctcacccggcacctcccaaaactttctcctcaatgtaatcagaagcaaggagagaactgcaaaaggaatacccttctcttgatgtgattcactggtactgaaagtctcgtccagagaccacctaaacccatcttggcacagcatctcgggaaatgctatactagaccataggcactagatgacctgccctgttgagctcattagtcccagcagggactcctagctttctatgcaccccactcctctatccccagtcttgaggtttgttccatctccttcctctctcattcattctcatttattcgccaacttttgtggccactaagtcctgggaatcatccagccaccagcctgggtcagctgcccagcctcccagcccagctctcccttcgttctctctcttctttttttttttttttttttttttttaatttttaatttttggagatggagtctcgctctgtcacccaggctggagtgcagtggcacgatctcagctcactacaacctgcgcctcccaggttcaagcgattctcctgcctc[134 bp omitted]cagcctcccaaagtgctgggatcacaggcgtgagccactgtgcccggcctcccttcattctctttctgttttcatgggttctgctcagcttaccaggctactagcctggtcttgcagagagaaaatgccagcaaagatgccgtccctcctgccctattctaaatctagagtctagggagagggaggcagaggcagaatggggacatcacaacctatgggacagaggttggggtggtggcgaaggaagagcatacagagagtagaagtcagaaatgtgctattaggttggtgcaaaagtaattgcgttttttgccattaaaaatggacaaaatagcaattacttttgcaccaacctaaatatttctctagaaaccagggactcccacatccccatccctgtctgactcctacacaatcctctggcctggcatctggaacacctgctcagcccaatcatgaactcaaaggagccacctgactgggtcagagggtcccacacagaagccagttggtggggtgttcccagccagcaggaccccaaaaaactccaagcagagagagccagtgaggcgacttgagagctcaggctcatgaggcaaacagagctgtgtttgagtcccgactccaccatccccttgggcaagtggctttgcacatctgagaaatggaaccaaaaatatcacatactactcagggttgttgtgggaagatgcgaatcaccctgggtctgtgcccaggatacattattttcccagagctggctgtaggactggggccacaagaacagaaaatgggtgaaggcaaagtacaagtatagtcacccccatgtcacagagaacagccagacatgaggaggtgggtgcaatcggaggcagcgcagacagccgagggctcaccctgcagaccagaggctgcctacaggaccactggatgtgctttgcttgacctgcagacctttttaaaaaaaagttttgacttagcttcaagcatacaaaaaccaagacaggtcttgtgaaaaaacaaataaaggccaggcgcagtggctcatgcctgtaatcccagcactttgggaggccaaggcaggcagatcacctgaggtcaggagttcaagaccagccttgccaatatggtgaaaccccttcaaataataataataataataataaacaaaaattagctgggcatggtggcacgtgcctggaatcccagctacctgggaggctaaagcaggagaatcgctggaacccaggaggcggaggctgcagtgagccaagatcgcaccactgaactccagcctgggcaacagagtgagactccatctcaagaaaaaaaaaaaaaagaaaagaaaaaaaagaaaagattcagttgtctcttgaaaagtcaggtggaccatactgcaggtgctatcgacaggatgaggagaaatgctgccacgttctccaccattctctatcacagtagtctgcaaccctggctgcccatgagaatcacctgagagcttagaaatgccctaggaagcccctgtcccattaaaccaggatccctagggctggaggtagggggctgatctgaagtcattggccctgaggaagcacctctacctgcctcactcagcgctattacctgccgggcccagacactatctgccccgatacctggttcaggcaagattcaggaataaggaaagactggggccccagaagacaaacccagcacccaggcccctgctggcagccccagctttaacttagtccactccacaatgtcttcactggaggggatgaggagctggcttggcatccctgttcccctcccccagccttcgcccatggctgcattacctctgtccaccctgagaaggacaaagctcctgaaggccaagactctgtgtagagaagagccaaggcaggagtcccatgagcattcaagttccaggttctcctgctgtctaacagatgcttctgccttcaaatatgctttctgtaaaaccctagagccacaccatcgccttagaaacctctggttccatccctctctgatagaagcatctatctgtccacaaccctaccccgatccacaggagtcaatataaatgtaaggtaaagaacagaccagacggcttgccagcaccgtttccgagacgtgatggggagagaggctcagggaagtgctggcgcccatagtctgtctggccccaggattggtgcattagtggcttatctgcaatttggggtatttcccactggttttgtgccatttctctaaaaatggggaactaaaaaaaaaagaaaacaaaaacaaaaaaacaagaaagtggtgtcatcactcccaggtccattccatcattctaagtaaatggagcaaagtggtctatgtctaacccagggcaggtggcacgatggaaatagaaaaggtggccctccccggcccaggaccagagtgacagcaaggcaaaggctcgctggaatgaggcaaggaaatgggattttgattgcatacacaaagcgtggcacagccagagaacagtgacaagtgacatgtgaatcacacagatgagggcttcccaggactcgacgtgtcccaacaggccgtgtggctcagccggagaaacaagaaaatgagggcagatgtaatcactatgcaggtacctcagtgaactaattccaccccaggggctctgacacagctggagacaggcctgtttcgggatgcacagtttaaagtcaaggggcactcctccccagccagtgcaggcttggatccttcacactcactggtaacaatcctggaagtcagaacacaggacttattctccaagcacaggatcattttgctgtcctcaagcacctggggagagcaggtgacaatctacaccttgctactgaaagccttgctgttatataagacgtggtccatagaccagcaacactgagcttgttagaaatgcagcatctgcgccccgctcccctcaagacctcctacatcagactgtataacaagtgcttcaggtgaatcgtgcgcacattaacgtttgagcagcactaatttaaagcttatgagctattttaccagtgcacaagggaatttctaggtactactaggtactgatcaagtgcgtgacagctacacgggcgcttgaggaatttcgagacagtttcagtcgaggcatctcaccctgacttttttctcaactgaattcaaggctgcagctacttcctcagttctctaactcacttatcaaccaaggcaatctcagatgaaaatgttttcccatagccattgagcctggcagagtaacatctcaggatgtatttatccacctgtttacttatttatctgtgcttcatgcttactcaaacatttattgggcacctactatatgtcaggcgctgagaatatgcagatgaatgaccccagccctgtcccaggcagagcttactttctggaagagagaaagatggcaggcagccacgcagcagtgtgatggacgtatgcaacgataacaggagaaagcaggtgctgagaaaggagtgggcgtccagaaagttcctgggaggggggtgctgcccaaaggtcatcgtaaggacaggctttctccttgccaggcttttctctgcttttcttgctccctcccatcttgctttctgctggattgattgcatattctttattccccctccctccacaaactttgcatttatagagtctatttatactacttaggtggttacactgacatttttaacatgtacacttgacttcaagcagaaagctaatcaatagctcttttctccttctgaataatacaaaaccctggaagggtttcacttcgatctcctccctcctaccttctcagtgttggatagcaatgaatcagacaaagatgctattttcccccaagttctggaactccctggttatttgttctctcctgccactgacaattttccaggaaaataaaaattccaaattgactcaagaggaaatagaaaacctgaataggtctataaccttcaaacgaattgattcggcagtctaaaacctaccttaaaaaactgtacctgtcggtgtggttttactgataagttttctcaaatcgttaagaaaaaaccacttaatccaatctcttccataaatagaaaacattcagctcctttttataataccctgatatcaagttcaaagaaaaacaattgggagaagaaaggaagtaaaagctcctaacctcacttagagaataggtgtaaaaattctaaataaacattagcaaatcctggaaatgcagagatattgaaatatcagaaaacttattaaactcaccatatcaaaagaaactacaaaaaaaaaaaataggataatctggatgcagaaaaagcaccggacaaaactcgacactcatttgtgattaaaacacacacaccaggactaaagtctgataaattataactattgaaaattaagggctgggagcggtggttcacacctgtaatcccagcactttaggaggctgaggtgggcaaatcacgaggtcaggagtttgagaccagcctgaccaacatggtgaaaccccacccctactaaaaatacaaaaattagccaggcgtggcggcacacacctgtaatcccagctactcaggaggctgaggcaggagaatcgcttgaacccaggaggcagaggtgcagtaagctgtgattgtgccactgtactccagcctgggtgacagagcaagacactgtctcacaaaaaaaaaaaagaaaaaggaaattaaaataaacttcatacttaatggaaaaccctggaagcttttctgttaaagtcaggaataagacaatgccattcaccatcatggtttcctttctgcactgaatatattataacacagtgaggcaacaaaaagaaataaataaatgaaataaagcctctaatcccagcactttggaaggccgaggtgggaggatcacttgagctgaggagttcaataccagcctgggcaatatagcgagaccctacgtctgcaaaaaattaagaaattagatgagtgtggtggcacacacctgtggtcccagctactcaggaggctgaagaaggaggatcacttgggaccaggagattgaggcttcagtgagttatgactgtccccctgcactctggcctgggtgacagagtgagaccttatctcagttttaaaaaaaaaaaaaaaaggctgggagcagtggttccttcctgtaatcccagcattttgagaggctgaggtgggcaaatcacttgaggctaggagtttgagaccaacccctcgaccaacatggtgaaaccccacccctactaaaaatacaaaaattaaccaggcgtggtggcacatgcctgtgatcccagctacttgggaggttaaggcatgagaatcacttgaacccaggaggcagaggttgtggtgagccaagaatgcactattgtactccagccttgggaagggaagagggaagggaaagtggaggggaaggagaggggaaagggaaagggaaaacgaagggggggaatgggaaagggaaggggaaagggaaagggaaagggaagtggaaagggagagggagaagtgggagggggagggggaggggagagggagagggagagggacagggggacggggaaggggaggggagacggggagagggggagaggaggagaagggacgggaggagaagggaggggaggggaagggaggggagggggaggtgacagaaatgcaagggggacagaaaaggggaggggaagggggaggggaaaggaagaaaaaagaaaaagagggaggcggaaagggaaggagggggagtcgggggagggaaaggaaaggaaaggaaaagaaaggagaaaggaaaagaaaaaaaaagaaaagagattgcaaaggaagaaacggctgacatattcatacattataattgtctacccctccaatcaagaaactctacaaactatcagaactaataagacagttcaagatctagtgataaaaattaccaatattctacagtaactaactactgaaggggtaaaggatatgccatcacaaaacatgccagattgttatactgatgatttcaagttgaaaacattggagaaactgtagtttcagaacggacgagctgaactgtctcttcctgcatgcaccaagcaatagagaatcctgtacgagggctgccctcccagtaccagggcgagaaaacagcgcatatcaccagagccggaatcaagcctgcaatggacttgactaaacatcatgaacagaataactcttacatttcacctgttttaccccacctctaatacaacttctagtgactccgccagaaaattgactgccctttgccatattttgttttgttatttctgatcaagtttatcactctatctaaaaagtataaagatatgttgctttggccacttctttgggcttcactgtcttgtgaagatcccatgtacacataaaactaataaaatttatatacttttctcatgttaatctgcctgatgtcaatttggtttccagatccagccaaagagcccgttaagagctaacaaggaggttggaggtgatctctggttcccttacactacagtaaacgacaataatcagaaaatgtaataaatacttatgattaaaatggctgattgaaaacgggctgtttatatccatgccctcctaaaaccccattaacaaagccacaaagaagaaaaaagtaagagttgacaataaatgagacatgtcaacataattttggacaatggaaaacaaatggataaatggcaaggacttagcatagatgagtgaacagaaacctgtatgtcttcttgtatgacaagaaatcagcagtttataatgcagaagctcagaaaggcccaggaaggctcacagcacaaagtatctatgaggtaaagacttaaaaaggaggctggaggagagcttacagattcctccacaccctcagcaactaagtgactgccctatcccaatggcagaaaacaacgggttgactctcaaggcaaactagtcctgagcttctggactcagagacacctagaggacaggtaacaagccataatgaaaacagggcaatgaggcaacttgtttacatactgcagattaagatcagaccaatttcctttttcaggaagctactgcagggtgtgatccaataaaacaagggagaaaaccaagaaaaggggaagacatgagatctaagaaatgaccaaaaagcagacaagaaagaaagaaataggatgatggtgaaggaagataaagatgacaactatttatcagacttgaagagcaacagaccagaacagagcaaatagatgcttctattgagatgaaaaaacagacctgatagattattttatgtggtgataggtgacagtacatgcggaagtttgttgttttttctgttgtgtgtgtgtgtgtgtgtgtgtgtgttttgttttgttttgttttgttttgttttggagacaggatctcactctgtcacctaggctggagtacagtggtgcaatcacagctcactgcagtctcgatctcccaggcttgagcaatcctcccacctcaggctccccagtagctgaaactgcagacgtgcaccaccatgcctggctaatttttgtatttttagtacagatggggttttgccatgttgctcaggctgctctcaaactcctgggctcaagagatcaacctgcctcagcctcccaaagtggtgggattacaggcatgagtcaccgcacctagcctgtggaagtttttaaagggctagtgaagagagaagaattggtgcaagggacagagaaaaccaagtaaataaaaccaattgcttttgtttttatttatttgctttcttgttgttgttccaccaaagaagtagaaggcaatcagtagctcagttgtaatttacactggcataataatataaacaccagaccctgatatcaccataggaccaccattgtgggaggtgagggaagaggttatatatggaggaaaggaaaaagtaaagtgttggtggaaaagccaggtctaatcttctgcaataagaagttcaatagacagtgtgtaaaattggtaggtagggggatatacaacagtataaacatatcatttagaaaaagggccaggtgcagcagctcatgcctataatcccagtgcttcgggaggccaaggcgggaggactgcttgaggccaggagttcaagaccagcctgggccacatagcaaaacctctatctctacaaaaaaaaatttttttaattagccaggtgtgatggtgcattcctgtagtcccagctacttgggaagctgaggtgggaagatcgcttgagcagagaaagaagagaaagaaaggaaagtaatcagatgatggtgaagaaagatcaagatgacaactgttcagacttgaagagcgacagaccaaagcagaggatgcagtgagctatgatcacaccactggactcctggctgggtgacacagcaaacccttctctctaaaataacaaaaaccccaaatggagataaagccccattgttacaagtggtggactctgagaagcatttggggtggagtatggtaggagaatgctcttttaaaactctattactttgataaaaataaacataaacactgtaaaccgaaaataaaattctaagtccttccaactatctgaatggacatcctccttggccaggatactctaaagtttaacctgaaagactggttcagatcatgaagggaaatggggatcagacatgcttcattacaaccctccagcattaacttcaacacagaccttatgtctgataagaaatacttacaacctattctctctgaagcctgctacctggaggcttcatctaaatgatgaaactttggtctcttattgcaacattcctttctattgataagtctttcaatcaactgccaattagaaaaattttagatctacctataacctggaaaccccagcttcaagctgtcccacctttctggaccaaaccaatgtatatcttaaatgtatttgactgatcatatctccctaaaatgtataaaaactaagcggcgccctgaccaccttggccacatgttctcaggacctcctgaggactgtgacacggtcatggtcactcatatttagctcagaataaaactcttcaaatattcgacagagtttcactcttttcattgacaacatcaaatttaaagaaaaaaaatacaccacgcacaatggcaacaaaactataagtgagctatgagtaaatataactaaagagtaaaagacttatatggagacaatgtaatgtactgactttggaggtgtttgaaccagagtgactccatcttgtatagaggctgggtaaaagataagtctgagacctactgggctgcactcctagtagatttggcattctaagtcacaggatgagataggaggtggccacaagatacaggtcataaagaccttgttggtagaacaggctgtgccaaagaagccggccaaaacccaccaaaaccaagatggcaacaaaactgacctctggtcatcctcgctgctcattatacgctaattataatgtattagcatgctaagagacattcccaccagcaccatgacagttgacagatgccaggaagttaccctatatggtctataaaggggaggagccctcagttccaggaactgccccctgcccctgccacctttcctggaaaattcatgaataatccaccccttatttggcatataatcaagaaataaccataaaaataggcaaccagcagccctcagagctgctctacctatgaagtagccattctttcattcctttactttcttaataaacttgctttagctttactccatgaactctccccaaattctttcttgcataagatccaagaacgctgtcttggggtctggttcaggacccctttccagtaacactgagatacaataaagaagatctagatcaatgggaatatacaacttgtttctagataggaagcccaatattaccaaggagatctttcttctcaaattaatctcaaaacgtagtgccattttaatgcaatagttgttcatagaactcaaggaggtaatcctagaattcacaggaaatagtcaagggccaagaacatccaagacaattttgaagaagaatgaggacttattccatcagatagtaaaacttcttgcaaagttacaattaaaatagtgaacagatagacaaatagtccaatgaaaccagaagaaagaccccagcaacagaacacacatttataaaaacatacagcaaaggtggtcatcaaatcagcgaggtgagaatagagggattttttaaaataagtaataacaagatgacaggctcctcagaaaaagagtacaattgggctcttgccttataacaaacaataaaaggaaattacaaatggatcaaagatctcaacatcaaacaaaaatctttaaaactttcagaaaagttaagaccatatatgacctcaccataagagttttttttttcttgagacggagtctcgctcttgttgcctaggctggagtgcgatggcgcgatctcagctcactgaaaccttcccctcccaggttcaagcgattctcctgcctcagcctcctgagtagctgggattacaggcatgtgccaccacacccagctaatttttgtatttttttgta[143 bp omitted]aaatccctaaagtaatcgattaataaatttgactagattgcaacaaaaaagttttgcatgacaaaatacatcattagaaaatgaagcggtaaagcaatgactgaaagactgcgaaatagaaaaatgagcagagaatgcacaggaaacccacaagagaggaaattcaaatggtaaataaacatttgaaaacagacacgacctgactagcaatgaaggaaatgcaaatgcaagttaaatccaaggtgtggtatttcacaccctcggatggcaaaaataagaagtctgatgtgttggcaaggcaaatggaaattctgatactctgtgggtggcagtctgcatttgcaaaacctctcagaaaaacaatttgacactatttaggaaagtccagatgtacattctcagacccagatattttccttctaggtatatggacccaagaaatacccaggccggtacacgaggggacaggcataaggataagcattacaccattgcttagaatgacctaaagtgtccaccaatggagataaaggtggcccatgcacatgctagaacagtacgcagcagttaagatgaactagctctacatgcaccaacacgaaaaaaactcaaaaacacattgtgtgaaaaaagtaaattaccaaggtataaatatcgtatggcacatctcatgtaagtttcaaaacaagacattgctaaacagtattttggatatacacacgttaataaagattttaaacatgctcatgggaaacacataccaaccccagaacagtggttgcctccaggaagagaaggaaagaagggaaaggaattggaagaacacacaggatttttaatgtcaaataatgtgttatttctgactgacatgtggccaatgttaatacttgtcaaatccagagatggtaataagcacatgaaaaatgttcagcatcatcaaccttcaggaaaatacaagataaaagcaccatgggaaactacatcatactccctagaatggctaaaagaatttttgttaatgctggcaaggaggtagaacaacagaagctcatacgctgctgtgatgaggaaattgaagcagtgacttcggaaaatagttttgccatttcttataaagttaaatgcatgcttaccatatgatccagcaatttcactcctacgtacttatgccagaaaagtgaaaatgtgtccgaaaaacctatacacaaatgttcacagcagatttattcataatagctaaatcatggaagcaacctaaatgtccatcaattgacaaaaggataagcaaattgcagtaaattcaactaatggaattctcattagcaataaaaaggggtgaaccattggtacaacaatgaggatgaatgtcagacattatcctgtgcaaaagaagccacattcaagagtacatactgcatgacacatttctgtgaaactctagaacaaacaaaactaacctagaggatagaaatcagattcagaagtgacctggagagatgagtgggtacagaggagagaaactgactgcaaaggggcaaaggagagctttctgggaagatgtcttacacactgactaattcaagtagtggttgcaagggtgtatacatttgtcaactcattggcctgtacgcatgtaataaatttcatgagaaattatagctcagtaaagttgattttaaaaatacgaatggcagatacatttgttaacatctctgtaattttctgtagacttaaatattttattaaaaattaaacagactttaggccaggtgtgatggctcatgcctgtaatcccagcacttgggaggctgagatgggtggatcacttgaggtcaggagatcaagaccagcgtggccaacatggtaaaaccctgtctctactaaaaatacaaaaattagttgggtgtggtggtgcacgcctgtaatcccagtgactcggtgatgcaggatttttctcggtccctttgccagtcagggacttctggctggcgatgccagaggccttgcccagggcatgctatctgccgcaggaggtgccctgcccagttggccttcccaggccaagtctggcttgtgcactgattcccaagttcttgtcccacatccaagaagaatgaggatgcactgaacattgaagtgtgaggaggacagagaagaattttattgaatgatgaaacagctttaaatacagaggggacacaggggtggtccccctacctgaaggcaggaaagtcccccatgtggctgggtccagggccttttatggactcagaatggggagtgcatgctgattggtttgtgagtatgcaaaaaaggttaaagcaaagacaccacgcagaagtgggcctggcagtacagaaaaccaattaggaaagggtaggtatacataaaataggtgaagggtagggatcaatcagaggaaagcacaccaaacaggaagacaagttctcagtctggtccaaggatttaaatggtagcttggctttcaggatttaagctgtcttcggcctggaggtgaggtttcacagggacctgcccctgcctacctaggcattggctgcctcctgctgctctcacagggaggctgcggcatgaggattgcttaaacctgggtggtggaatttgcagtgaggcaagatcatgccactgcactccagcctgggcaatagagcgagactccatctcaaaaaaataaaaataaatataaacagactttaaaaatatgggttatcaatggcctatattggtgggggcaggaatttttagggggagaataaaaaactaaggtggtttacaatgttaattcatttcttcccagtggtagagttgtctatttaataatcatagtggtcctattagaagtcaaagggtccgttgagatcagctggtcctggcgtctctttttcagaaaagaggccccaagtgagatttgtccaagatcactacagcagatacctgttatttcagctgcccagtatcccttccctttatctttttttttgagacaaagtctcgctcttgtcccccaggctggagtgcgatggtgcaatctcagctcactgcaacctctgcttcccaggttcaagtgattctcctgcctcagcctcccaagtagctgagattacaggcacctgccaccacacctggctaatatttgtatttttagtagagatggggtttcaccatgttggccaggctggtcttgaactcctgacctcaggtgatccacgtgcctcggcctcccaaaatgctgggattacaggcgtgagcccccgtgcccggcccctttccctatatcttaatagcagcccgctcttttttaaggggattctctctcccctgctgggcactttctctgtagggctattaatccaggtgccagctctccacaacaaacgccaagcggtccccggtggctccttcacagggtacaggtgtgtgaccgatggccccctcaggacacttcgtgctgatactttaaattatgggtaagaggagcaagaaagggatgcatggaagtcatccatcctgacccacaggcctgaccatgctgtttttgctataagactgttcttattattcctacttcctggcctcacactgctgagcaccttggtttctatctgttttcaggaggtttccccggtctctgcccagtctataaccttccagtgtctttgcaataaattccacttggcttacatcagccagaatcagtttctaatatttataatcaaagaaccctgagtgacacatcacccaaccagcccaagggagaccaagcccacagcccagagttctggagtgtggacacctgtccttgggagtgtcagccacgaagccaacttctcaggatctcgatttccccacctccatcccc[145 bp omitted]cccgtctctactaaaaataccaaaaaaaataaaaattagccaggcatggtggcgggcgcttgtagtcccagctactcaggaggctgaggca[134 bp omitted]gaaccatcccttactgagtgatgtgacaagcactttgacacattttaatttagtccttccaacagcctagtaacatagggattatcccaatttacctatgaagacactgacgctgagcaagaaaaatgttttcccaaggtggcagagctcctgagtgacagagccagaattggagccaaatctgtctaacttgaaaaagcctagctcttgtcacttcatcctcctgcctcgcctcaagaaacaatcagtcactgagacttcaatgaggtgtcagaggcatgactggatgttggctgcacctacaacatattgaggggggtcaactgtgtacactgagccagggcacccacccaggcaggcgcgaccatgaatgggggcgcagagggtgggggtgaggagcagccttggtgcctgaggaatggtgtaggaaacatccttaccctggaggagtggaagtgaattctttctgcattgagatgaatacatgttcgtgttcccatggcaacaaagcatgctcactgttgtccatacctggaactgtgtgactcatttttggcagtgcaggagtcccgtccacagtcattagctaatcagcctggaatgtgtgcatgacagcactgatcatatctggggagataagcggggtctatgagtgtccccctgcaactctgaaggccaggattatgtctccttcattttcacccggcattcccgatccttggcatggtctctgttaccgaaccattgttaaggaatctgggtttgttctgggcttcctcaatcggcagaaagaatggtgacagagtttgagtgaaagccaaaggtagggtagggaatgaaacatggcatgaaaagggaagaaattggggttgtacaagctgttaaaatcactaggaactgctgggaggtgcagaattctgatttcagaccaaagcttattcattaatacaccttgaagggtggcatgtggaagaaataattctggcagatcctgccatgggtcaggtataatctcagagtgatttggttcagtcctaggcatttccagggaggaggaagaggaatcttggaagagacattacttagccaccagctcacgggaacgcatcacagataatgatactggagggagctgaggtcagggcagaagagccgtgtcatacaagccaaagcaaccccagtgtccctacaaaaagagggggtccagaggctgcaaggagcctatcagatcaacctagaaaatcttgagtggctccccagttatgaaataatgtcacaaacttgacaaaggacctctactgggcatcagcagagactgatcagggtctgtgaaaacatgtggttcccacttaattccttggaaggtggtaaagctctggtgtgcatggagaagaccccaaagggacaatccaccagaccaggagactgagatctcagggtgagttcagcctgagctcgccgggagagctctacacgcaaactcacaagagcacatgggttcagctacccccacttctgctaagcaggtagccctccccacaatgaccagatcactgatagagaagaactggcccagcatgttttctgaggcacactcatgatcaacaccaactcagtagctcttatcatcaaaggccttccttaggtgggagtatggcatgtgtgtcccaggtggacgatgagcttgtaagctcttgggacacaaagggccaagtttccttgtccacagcagccagcagccatggttgcatgctgcagacagtcaataaaggttcactgagttcactgatgaatgaagaaaggaaggaaggaggcaggggaggctttctggacagtttcctcaaatggtttgcaagccttccttaccacaggggactgaagcagtaagcgtcagggttccccgaacacagccaggactgttaccactgaactctgaaaagaaggctgcaatggggtcctgggggagattgaacatttctgaactctttatcatagagaaaaggaagcagtgctgaattccaaggcccttctcacttctaaaaatccacaggtctctcagaatcctctaagaaagtaagcgaaaataaggaaactgtctacaaagtggcatatttggaaggaggggagggagaccccaagagcagaggagtcagcaggggagcctttggtgcccccatcctcgctccagccagggaagacccacttcacctcaaatgtgcactagggtgctacacaatttcagtaaataaaagggaagaagggcttgggctgctttaaaaaatatatggatgcagcctggccaacatggtgaaaccctgtctctactaaaaacacaaaaattagccaggcatggtggtgcatgcctgtgatcccagctactcgggaggctgaggaaggagagtcagttgaacccaggaggcggaggttgcagtgagctgagattgcgccactgcactccagccggggcaacagagcgagactctatctcaataataataataataataataataataataataataaatatgtatatatgcataaggagtgagctagcacaaccctggctctgttaggggtaccactgggacaggccatgggtgaccttaggagggatagaggggcaggtacaaaaccccaggcagctggctgccaacaaccatcatttttggctctaacactccaatactctgagcctccaggctgaggcaatgaggggttcaggaaaaggggactcgagcatcccaacataaagttccttggccactctgactcttgttaaatctgtgcagcccgggcaggaggggcagttccacgcagcactaattgccaagcatctttttacgaggctcagccatgacatctaaatggattcaaggtaaatcctcacacagcctggtgtctttaacagggaaataaatcatcccaattatacagggcgagctgccatgctgtctctatttctggagcggttgcttcccatgctggaagggagggaaaatgcaatgtagacaaaaaacccagggaagggatgtcaagttcaaagggcccatttcagagcagggaaaagctaggaggagaggggggttcaagctgaaccatagcttctctgagacaagcaggatttgaaaagagaattaggaggccgggcatggtggctcatgcctgcaaccccagcactttgagaggctgaggcaggcagatcacctgaggtcaggagttcgagaccagcctgaccaatatggcaaaaccccatctctactaaaaatacaaaaaaaatgagccaggcatggtggcaggtgcctgtaatcccagctactcaggagactgaggcaggagaatcgcttgaacccaggaggcagaggttgcagtgagcagagatcgtgtcattgcactccagcctgggccacagagcagactctgtctcaaaaaagaaaaaaaagaaagaaaagaaaagaaaaaagaattagtgaaagttcccatgcactgtcttcccccatccagtcacccagagtgaaaaactaaatgaagacaaaataacagtagaaaaaaagataaggtcagggtgaactggagacctcttcaatccaatcctccagcacaaaatgcaagcccgcaaatctggcatggagctttgcagccagcaccaaaggagaagtgtgcttggctacatggtctgcagtgtcctcaagataaaataaaccacctgctccgggcaagcacaaccattcctgtgctaacaccaaaagaaattcctcctacgggttcagagaaagagaacacagtaaaaaaaaaaaaaaagtatttaaagaccatgagtttcatagtgctgtttattttaacccctagtttgaactaagtccttcagaagcattccatgggtatcacattctggctacagttcctacaacctagttgtcagtaaaggccctgctcacagaaggagtaaaaataagagaaccatcacacttggggagaaaggtaaggaggagaggcagtgcttagtgtaaagaagtcattccttgtctgttataacaggaacctggtagtttcaaagttaataaatcgagaaacaacatacaattgttgtatttaaaattctggaggcaaccaccaggagaactaaaagcaaacccttagaagtgtgactggaggccgggtgcagtggctcacacctctaatcccagcactttgggaggccaaggcaggtaggtcacttgaggccgggagttcgagaccagcccggccaacatggtgaaaccctgcctctactaaaaatacgaaaaattagccaggcatggtggcgagtgcctgtaatcccagctactcgggaggctgagacaggagaatggcttgaacccgggaggcagaggttgcagtgagccgagatcgtgccactgcactacagcctcggcaatagagagagactccgtctccaaaaaaaaaaaaagcagcatggctggaaaggggaggagtgaggtgtgagtgtgctgttttgcattctaagtccttcagtacaatttgattttggttttaacgatggacattttattcctttcgcttaaaataaaaactaaggcttttcagtttacagcatggaaaatgaggaaagaacacacaccaggatgcaatgtaaatgagagtatgtgttacaggaataaccttgagtttgtcctgatttatacacaaaaggagatctctcacaaacttcagaattagtaagaacagatctctgcaacacacctcacagccgacagagacacaagcatactacaccgtcagaatgggaaactgcaaatctaaacggctctttaaaatcctgaactctttcaaactccatcatgctagccctctctgcagctcactcgtggctttcagagcctggcagagagggaaaaattcaggttgtggtgttgcaaaaaaacacctgctttccctcaatgccagtgcatttcacaaatgacatcaatttcatgccagggcatgaaatcactgaagccagttaacatcctcagtttttggatgaggacgtggagtgcccagatagggagtgactagcccaaagtctcaaaacgacgggatggcaacctcagaacatgattactccaagtccaatccagcactccttccaccacatcagtgtgtgttctgaacacttcgacatgctggagagccgcttgaaaagtggggttccactgtcaaatgtggatgaaaccaagccaagaaggcttttctctccccacaggactctcagaggcaatgatggaacccatcctgactcccaacccttctcaccgcctctctcctccacccctaccaagggccacgcacagcccagggctcctgctcccctcaatgctctccctgcttttattgtggccatgttttacctcccattcatcctctacccagcagccagagtgatccttccaaaaagacccattaaaaatctagcacaacaggaaactccacagagacagaaagcagatgggtggttgtcaggggctgagtggctggggactgactgcttaatgagcatgaggtctcctttggggatgatgaaaatgtttggaatgagagagaagtaacggttgtacaacattgtgaatgtaccaaatgccaccgaactgtttactttagagtggtgacttttttgggttttgtttgtttgtttgggacggagtcttgctctgtccccaggctagagcacggtggtgggatctcagctcactgcaacctccgcctcccaggttaaagcgattctcttgcctcagcctcccgagtagctgggactacgggtgcccaccaccacacccagctaatttttgtatttttagtagagatggggcttcactatattggccaggatagtctcgatctcttgacctcgtgagctgcctgcctcggtctcccaaagtgctaggattacaggtgtgagccaccacgcccagctggggttttgtttttgagacagagtctagctgtgtcacccaggctggagtgcagtgacaccatctcggctcactgcagccgcgacctcctggactcaagtgatcctcccacttcagcctcctgagtagcagggactgcaggcacatgccaccatatctggctaagttttgtaatttttttgtagagagagggttttgccatgtttgcccaggctggtctcaaactcctgggatccatccagccatcatgaaactttttgtgtcataaaattttgtctcaatttaaaaaaaaaaaaatgtgccctgactaaaacatcttcagtggacacccaccttcctcaaagtaaaatcccatgtctatagtggcctaaacagtctcccccgtttctccccctattccagacacaatggcctcctctgagtcctcacacaggccaagtcggtgtccacctctctgacttcgcacatgtattctctctctctctggaacattctttcctccgacacctacaaggctgctccctcatttcattcaagtctttgctcaaatgttaccaacccaagactgtccctgccaaccgcatctaaaataccatctcctgccaccctttgctctgagagaggaaaacagtacactactagcctgatattttgttatacagttagtggcttttagtggtctgctttccccagcagaatctaaacagtgagggcagggactgtgttagaaatggccagcacccaaaatagagcctgacacacaactgctgttcaatagaaacaggttaaatgaatgaatgtccatgcagatgttccctaaggttcaaagttatttgtccagggatattttttccccaagggacatcttggcaggtgagcgttcaacaggttgactttgacaagtgcttgctgcattagtttcatatgactgctgtaacaatcacaaacctcttggcttcaacccacatgttttctcttacaatattctgaggtcagaagtccaaaaccaagtcaaaaatcaaggtgtcaggagggccacgccccccttggaggctctaggggaaaattgttccttgtctcttccagattctctggtagctgccagcattccttggcttgtggttgcatcaccctgatctttgtctccatggtcacatcaccttctcctctgtatgtgttggcaaaatctccctctctctctcagaggcacagttgtgattgcatttaggacccacccagataatccaaaataacctcctagtccccaaatccttaacttaaccacatctgcaaaatccgtcttgccatataaggtaagttcacagactctaaggataaggacctgaatatctgtaggagccagtctttagtccaccatactcgctaactgtgctgctgctcacttatgtcaatgtcgttgctgtgttttagggttttaggaaagggttcgggagactgtgctctagtcccaatgctacacaaccttggacaagaccaaccccttgtcaagcccccactatctcacctttataaggaagctgttgcttctatgagtccattcatatctaatat[137 bp omitted]aacccagtctctactaaacatacaaaaattagctgggcatggtggcacacgcctgagtcccagctactcaggaggctgaagcaggagaatcgcttgaacccaggaggcagaggttgcagtgagccaagatcagcctggcaacagagtgagactccgtctcaaaaaaaaaaaaaaaaaaaaagctgaaaagcttgctgagggcttaaaacaagaatcaaaatcaggagctcccatggaaagaggggccaaaagcttccctcccaccacctgcaatcctacgaacagttgttatgcggggaaaaaatcaaatacctacaatcctgctatgagtatttcacgaaatttattcttaatacagttgacattagactctatgttcagctgaccccatttttttcactgaacactactacgtatttcatctactatgtatttcatctactactacgtatttcaatacgtgttattgaaacctctcattttaaatcctttgctggttagccactcccaagaaatcagacatggctcagcaccctctcaggagacagccatcaaggtccccttctggcataagaagcaaagatgtgggaacttccttaacccatggactaagtgatgggtacatcaaatcagcttgcaaataggggacaactctttgctgcttatccctcttcctcagcacagacctatggcagctgccatgaacctaaggaatacgaccaatggtccatgggttacagactgctaatcgctaacctaaggcaaagaccccaagatcagcagcttgcaggccccaggcactcagcaagccctggcagttagctgagcagctgtgccctgtgtggtacccacttacttagcagagagaaaacacctggtatctccctgaatgcacagctgggtcattcctgaaggatatgagctcagctgccagctgtcaggacctcacagtcacagtatcaacacaagagttaaaagaatacaggtcataaggccagagctccaggtcccttccactgcctacctctgtccttaggcgagccatgggaactctctggatatttctttttctttttcttttttttcttttttttgagacagagtcttgctctgtagcacaggctgtagtgcagcggcgcgatctcggctcactgcaacctccgcctcctggattcaagcaattctcctgcctcagactcccaagtagctgagaccacagacacgcgccaccacgcctgactaattttttgtatttttagtagagacagg[135 bp omitted]aaaaacctgcctcacgaggggattaacagaatttaataaaacagtaagtctttgtaaccaccattcaggcagagcaagaagatacagtttatcatcccgtcttttaacaaccttctcactgccttactctcccttcatttccatttctgtcatccgcaatatgatttccacccctcagcactcaactggatggcctccagatcgccacatgcaatctttccacgcggcctttaacaaaaagggctctggaaccagatggcctaggttcaagtcccagctgcacaacttcctgtgcctaggtttcctcacgcattgacaatgataataggaccctccttacagggctcttatggacgctgaatgtgccaagaagtgtaaattacacctggcacataggaaggtatattggtattccctgaaatctattttctaaactttgattagacaacataatatacacaaaaattgcataacacataaatgtgtagcataataaagtaaactccatgaagctttctgagtgtcccttcctgatctgaccattctttattccagaaggaactgctatcccaaattctccagaaatcactgggccctcgaactcctgggctcaagtgatcctgccaaagtgctgagattacaggcgtgagtcaccacggctggcctgtggcagtggaatttatagacaataaaattcatcctttgaaggtccagtttgatgacaaatgtgtaagtttctcagatcttggccgcagtggctcatgcctgtaatcccagcattttcggaggctgaggcgggcggatcacaaggtcaggagatcgagaccatcctggccaacatggtgaaaccctgtctcttccaaaaatacaaaaattagctgggcatggtggtgcatgcctgtaatcccagctactcgggaggctaaggcaggagagtcagaggttgcagtgagctgagatcatgccactgcactccagcctggtgacagagcgagactccatctcaaaaaaaaaaaaaaaaataaggttctcagatcttaacacctctgcccgtgtgctccatcccctacaaacagcacaaacctctttaacccagtcctttcccttcctttgcagaatgacgtgttctctgaagtcactgatccaccttcctgttcctcctcattcctcaacctggctgtgcccattgcgggtatgttccttggggctccatccctggtcctgctttctcccccacagcattctcttgccaggttcatctgctccctcagcagcgtctctgcagatcactcccaagtctgcgccaaggccccaacttgtctgataaagcacactcagtctgagaatcacaggccactgacacctcaaattcaggatatgcaaaggcaaattctgtttgccccaaccagtctctgccacatatatatatattttctatgttatagtccctagaagccaaaccaaaatcagacttttcaatttatcaaattccctacagtcaaccacttcccaaatcccctgtactcaactgccaagatctctccaagttttttctgtgcctccaaatgcctcccctcttctgtttgccaggggagggtgtcctcactcaaaataacttctaatgggccctacaggcaaaatccaagcacaagtccttcagggagcttccatgttgtggtaagccaatgaggaatctgtcacttgggcctgcataccccacagtggccttcttccaaggatggcactccattttcctgtggggagccacacttctccattctcaggtatggacagcactacccacccaacagacccaggcctaaggccatcacccagtcaattcagaaccagcacctggttctgacaagccactccatttcatggggcttcatcttatggaaaaggagctgtcttttgccaatggtctcagcgcagggaggataccagtctggagctgccagcttccaacgtgcagctcaagtgagaaagcgcacatcctgacatctttggatcctgtagccacagaacctacggatccacgagtggcgtccaaaacacgcccttcttggcttaagccatactgggctggttttctagcctttgcaatagaaagggtcccatccgaggctgcaatttccttccttccctcatcatctcaccatcccctcaccctgcagctatgccagacattttctaaatcaaaaacacaacaaataccccaaaaaacttttcaagccagctgccttatttaattcccaagcattcctctgatgtctctgtgcctttgcccacgccgatctctggcgctgggctgccttccctctctagtcttggggaatcctactcctctgtaaggcctcctcaccttcctctcccttctctgagcccccataacattctgaatacatttactacagttccctgcttaaactcggctcttccaacaagaccgcaagctcctatggcagtggtcagggcccactcacaacatctctgcattaacccagaaggtgactcaaaaaatacttgcttgactgaatgggaggaagatggcagagcagaagagagactccccggatggggttactcagtctctcggggctctgccaggtatagatcttacacacagccacattcccagggtgacgagaggaaccggggcacacagctcacctccaaaaaagcagggcgagcaggacacactggacacacaaatcaggtgaagcaggtgcagcagctcttgcagggcacaagcacaaagccctggcctccatgagatcccttccaggctgctgagtttttcacatttttacaaactcaggacctcagagccgtaataacccatgtgggctctgtgcttctatcggaatccgcaggcaggtatggcaggcacgacaggtacacactaggcaacctctgccctcgctctgggtcag[135 bp omitted]accccgtctctactaaaaatataaaaattagccacaggtggtggcaggcgactgtaatcccagctatttgggaggctgagacaggagaatcacttgaacccaggaggcagaggtcgcaatgagccaagatcgtgccactgcactccagcccgggtgacagagcaagactccatctcaaaaaaaaaaaaaaaagtgtacattgggactcgcctccttgtgcccaagagaccctggggtgtccccaaacttctgtgccactccatgcccccattcaccttatgccacccttttcttctctccaggagactcttgggcacccagagcacatggaataaagagtgagctggagccgcgggctacaaggggtagggacagctgtggggacctccctctaggactagcctggccaggagagcaggaggtggcttccccagctgctgccaaaagacacctccagccacaactctccactcaccccatgcagccagggctgcccactgctgtcttccacgctgtcctgtagtggctgcttttgcccagatctctccatccaccacaaaatgaacctaacgaggatgcagggtgatgaggtgatgaggtggttcaggctccaagcaagaaagaagcctttgtttgccaaaggtgggtcagaccttcttgtcccagtggccgagacagcagaggaagagtgtaaagtgggattatatgctacaataggtatgacaggagctacaaggattggctcagagccatgggaagtgggcatatccctagccaggcactctccttcagaacacagataaaacaggtggccgggcgcggtggctgatgcctgtaatcccagcactttgggaggctgagatgggcggatcacgaggtcaggagatccagaccatcctggctaacacggtgaagccctgtctctactaaaaatacaaaaaattagccgggtgtggtggcgggcacctgtagtcccagctacttgggaggctgaggcagaatggcgtgaacccggtaggcggagcttgcagtgagccaagatcgtgccactgcactccagcctggatgacagagcgagactccatctcaaaaaaagaaaataaaaaaagaatgcagataacacaggttagatgaagggcagagttgtggccatgggcatggaggtgagagatgggtaccgaatgtcagctctccattagctagtagcaggactttctctaagccctgtctccttatgcttgtgaaataggcctgctggatttaataatctatctcagaggccccttccagtaataagcctgtgagtcatcagaaaatgcatggagaggtggagacacacccatccaaaccctccctctgcccacccatttaccaaacagcgcctgttccaccagcccactgctaagcttagggtgcattcctggggagccctccccaaaacaggttccacatggccctgtgaggcttctaccacagacgccgaaagaggcagatctgcctgcagcagggtacaaccagagcaggcagggactttgcaaatctttctggccggtgaaaagtttaaacaccgtcatgctgttaagtgatccgagagcagcatctttccaccgccctggagtggttctggcagggcaccctgcactgggggtgccgaaagtgaagaatgaattacattgcttaatttctcctccaatgtacttttttttggacggcgggggagtggagacattccacacaataggaaagagacccatcctgggcaaggcatagccagatataacaatgcaaatgtgtgtacatatacaactcttcattttgaaagggaagctgaatctctgtgacttttgcaagattagtcaccctgggtgcagcacctaagtgtcccagtccttaggtgccctctgccctggccttctccccaaggtataccctctcaccaacctaatatattcaaaacctaagagtgtaattcgttacctttcttccaaattcacttaagacttaagactgtgtcaatctctaaaagcatataacagggacagtggacagtggaaggccagaacactcttctgtcctaatgggttcaagaaatattcttagcttcttagaccagttcccttagcacctacatagaagatcaggaatggaaagagacaagaaaagaggaggttgagatccatctattatcctccttattaggagtttaaaggctccgaaagaggaaatgaaaactttgggttaaaagaagactcagtggaattattcggatttaaaatataattgaactgaacaattgatacacggctctttacatccttgactttttgtggttgatttcattatatttctagctcaacctgcaaccttatctcctatttagcacagatgatcaaaaacatgttgccggacactcaaagaaatgatctgtatctgttcatcttgatttcctcagcatctttttctccctttgtgtggattcaggcacatggactcacacaaagttcagcacagaatgccacttcccagaggtctcctctctgccctctattccttcaggtctctacaacttctctaacactaaccatcctgcttccatctctgcctgagagctagaccggatctctcaaatcccatccaggtgagagcaaggattccatcactaccatatcttaccagttaccattgtgggtagacatccattctcctccctcaggtatcagctgacttgcatttgctcccttctcagcccaggtggtgaggatggggctgatccacctcccaacccccccatccaggctccatctgaaagctgctaggtgactttcctggtttttttcccctctttggaattacgaagtttttagaatcagaaagactctaaagtctttagaatcagaaagtttttagagtcagaaagattctaaaaacttcataattccaaagcgggataaaaagggttttctgagaagattgctaagctagaaaatgaagctaaaacagagggatgcaaagcctagagatggagatttctgatgacactgcctttgcttcttctattggttatttactgggtgtaacaaatttgcccaaaaattagcgacttaaaacaacagtcatttggccacgtgcagtggctcatgcctgtaatcccagctactcggaaggctgaggcaggaggatcacttgagcccaggaggtccagaccagtctaagcaacatagcaagaccccatctcaaaaacaaaaaaaaccaaatatggtcacttatggattcagtttctggggagcaggtatccacgcatggttttcccagaccccgagccttacccagggtctctcccaaggctacaatcaagatgtcagccagggctgtagtcaccataagtctcaatcagaggagaatctgcttccaaactcattcatgttgaggctgttgaggcatttgttagtttcttgccacatgcgtctctccctaggacagccaaccagcaagcaggcaagagaaaacaagcatggcggaagccacggccattttgttacctgctctcaggagtgacattctgtcatatctattgttagaagcaagttactgtgtcccgcccacactcaaggggaagggattacacaagagtgaccaggaggcagggagcacagaaagccatcttagaggccacctaacacatctctagaacaggcggtacctacagccacacgcctgtgggcttttcattcatgagggccaataaatccctgcaccccacactctgtgactgtcgctcagctggtttgacttgggctgctaccacttaaaacccagggtccctcggactttaccacaactccttgttacagtcatggctgactcttccaggcactccctctcattggttaaagagaagcattagcccctgacttctatcactgttcccaccatgcgttttggcaaagggatgccaggacccatctaagttggcttctcagtttttcacgctctttgtgcttctgccctggttcttggccaggctgcctggtacatggggccctgccctctgcctgtcttctatgaaattttctaaggggtctgggaccagcagagactggcagaaccatctaagcaactccctccccaaatagtgcccatgcataaggtaatccagacaccccaaggagctctgaacagtgggcctatagggtcattgtttagctcagagattgtggtattatattaatacattttttttcaaggaagaaaacaaaccagatctaagctgaatgagttttgaaaacgcactgaaagaaatctgattgatctagaaggaagaaaagaaagagtgcccgtaaaaaaaaaaaaaaaaaaaaaaaaaagaatcttccccattgttgaccactgagattcagccttctaattcagaggggagcacaaggtgacccctgaattatgctacaccaattcagctgaaattaagggtaatttgtacaaagagtctggaattttcaaggagaactaattcctactgtcccagccatgaaaatcagagtttccagcatagtagtctaatctcttagtcggctagctgactaagtatttctttggtgggactacgcaaggttgggcagctagaatggcctccgcatgctgattttgagtgacccacattgcttacatagacaagtgcccacacgttctaggggcagccctgcctccacaccaccttggctacctattccagtggtcatcccctgacctggtattttaaatccagacttctcaagcctggatgagcatctgaattaccagaggagattttttaaagtagggtacccaggacacactctataccaattaattcacaacctccatcaaaatcaaaatacccaggccctgttttttttttttggtttggtttccgggtctttatgttccccagataattccaacattgacaagacccattttaaacggagagccacaaatcccaaacaggcactcaactcttgcttactctgccccaaatgaatgttcaataggcgagtaattaggcatatcctggacacattttaggaaactgtctcttcctaaacttcccattgaggaagggctgtggaatctcgatcctcagagtgggatccagggaggcaccagcagcattcctgtcgcctagaagcttgttagaaatgcagaatctgcattttaacaaaccctgaccggacgtagtggctcacacctgtaatcccagcattttgggaggccgaggtgggcagattgctaagagcccaggagtttgagaccagcctgggcaatatggcaaaacccctcctctaaaaaaattagccaggcgtggtggtgcacacttgtggtcctagctactcaggaggctaaggtgggagaatcacctgagcctggggagtagaggctgcagtgagagctgtgactgtaacactgtactccatccagtctgggtgataggttaagaccctgtctcaaacaaaccaaccaaccaacccccatgtagttggtttgcacatttaaatttgagaagcacagctcatgccatctagcgaccctactctagctgcccagtgagactgttttccattttccaaaacaacgatttcatttctcagatgatgggaaatgttttctctca[131 bp omitted]agaaaccccgtctctaccaaaaatacaaaaattagctgggtgtggtggcacatgcctgtaatcccggctactagggaggctgaggcaggagaactgcttgaacctgggaggcagaggttgcagtgagccaagatctcaccattgcactccagcctgggtgacacagcaagactgcatctcaaaaaatctcaaaaaaaaaaaaaaagaagcaaacccatagaacccatagtagctgctcatcaacccacagcccaaattcatcctatcctacccacatcagagcccacgctcgcagccttccctcccacaacagtaactcctcctaccaaaggcaacttacctgctttctaccgatcagcacataatacctacctttaaatttaaaaaattaaagataaatatatcctttgaccccagttctccattcctttattcatttccttctcctaacagaaaaaattttcaccaaaaatgttgcctgtagtcacggcttcgaatcttttacctctaattccctccttcccactccactgagcctactctccacaatgtcaccagtgacctccatgttgtcaccaaatccaagggcatctgtctctcttctagagtcgttggccagccagcaacattcaatgtcccctttttccagaaaccatgactgctctgggctcccatgacatctcatgggttttctcaagtagtcacctttttggatcatcctctgtgtgttcttaaatgtcacagtgcccagagctcactcctgccccacctcttttctatctactcactccctgtagtggcctgaccctgttccatagcttcagacattctctattcccaatgactctaaattaatatctctagccctgacctgtcccagctctccagacccatggccacctggctacctatcatccctatgctgatgctcaggaggaatctaacgaatctaatgactcattttcttcacttccaaaaacaaaactagacctgctctccataactcattttaataaatggtaccaccatctatcatcctgttgcttacaccccaaaatctaggattctcaagtccacacaccttccacatccaattcctctcacctatcagttctatctctaaaacatcctgatccatccacattttccttctccactgctgccatgctgttccctacattattacgatgatcttcttgttccacttttcatcccctccaattcattctcacattgcagccagagggaacttataaaacatccatcaaattatgtcagccttgtaactaaaatcatcccaaggctttgcactactcctagaaaaaccaacccaaaccatttaccctaattcataaagcaataaagcctgcctctgactacctcaccttacactgttttctgctcttcccctccagccaccctgaccttctagctctgtgctgtccaatgcaggagactctggccacatacggctatttaaagttaaaattaaattaattgaaactcaaatagaatgcaaacatgccatgcgtattcctacccgacgccgttggtaaggcgtctccctctgcttggagcacctgccctgcttttagggggaagccacaccttctcttgccttccaggtgtggtgtggctcaggtggtggctcctccacaaacaccggcccctcctctgatcttctccagcacctgcctgcagcccagctttgactcttattcaaactcaaataaaattcagttccttggtctcactagccattttgcaagtgctcagcggtcccatgtgactagtggctaccatgttagatggtacaggcctagagcatccctgtccctgcagaaatttctattggactgtgctgttctagcattcccaggatgaggcaggtctgatcttgcatgacacttttgcacttgctgtcacctctgcctggaatgctgttccccttcccctccctgtggccagctgcttcttgtcatccagacaacagtttaagcgtcaccgctccagagaggccttccctaagctcccaatccaaagaagccacccacttcctcccaatcgcatgagcccgtgtaactgcagagcacgtatcactagctcatgcctttcttgtttgcgtctgtcagcttattccccaactctaccccacctctccaccccaaagtatactcgtgagatcagggacctgggtagtcttactcaccactgcattccagctcctcctcctgcatctgcccgatgactctgctcagtaagtgttagtggactgccagaccttgccatgttcgtatttcctctcgagtctctcacaaccatcaccttctcatcattatccctgccaccacccaggcggggcctttatcctctcctcctgggcagtactataaacagaatcctacctctgccctccagtcaaccctgcaaacattagcacgttactcctactaacattcctcttgtcatatcaactcccggttcctccatcttctggtcccaaatagcctccacatccccaaaagtgccatgcgtattcctacctcggtgctgctggtaaggcctctccctctgcttggagcacctgccctgcttctcagggaaggccacaccttctcttaccttccaggtgtggctcgggtggcggctcctccgcagacaccggcccctcctctgatcttctccagcacctgtctgcagcccagctttggctcttactcaagaagtctcacatcccatgtgcaggcacacagataatccccaagaccatgtctaaaattcaacagtctcaaactttgctgaggatcagaatcaccgggagagctaatgaagaacacacaggtccaggctcacggaagcaggatagagtctgaatctctgtactttttccaccttccttaggagatttgagatttgcatctttagagcattagaccttcaacatgaatagctcaacctctcttcatcctcgctcccacccacacacccttcccagcctctagttaaagatcacttaaccaattccagcaactcagaactcctggggagtgaccgacttggcgaataacgtcctctcacacaaacctgctcttcttcaattattaaaagatacccgctgtggtaggcttgaaagtgcccccccccccaaatatattaatatcttaatcaccagaacctgtgaatgttaccttatatggcaaaagggactttgtagggcatgactgacttaaggattttgaggtgggggagttattctggattatctgggtaggttctaaatgcaatcacagggtctaagaggaagacaaggtcaaagaagaaagaggctgatgccacagtcccactggactgtggtaaggtggttccttacaccaaggtggaaacaggcgccaaggaaggagttcaagaggatgaaaacaggaaggaacagattctccttggagcttccagaaggaccagccctgccgacaccttaatttttagccttgtaaaactcatttcagactttggatccttagaactatgagtaaataaatgcattttaagtcactgcatttgtggcattcgttacagcagcaatgggaaactaacacacttcctcttacataacactacaaggtgaagttctactttgtctgtcttgctgggcctccattaacctttataggaacggccccaggttcaagaggccaaagacgagacacagagccagccaatgagacacagggttttatcagctggaaacttacatacagagtggtccagtggtggcaggctgggaaggagaagtagcttatatacagtccagtggtggcgggctgggcaggagaactgccttacacacagtccagtggtggcgggctgggcaggagaactaccttacacatagtccagtggcaggctgagcaggggaaccaccttacacacagtccagtggtggtgagctggttagggaaaccgccttacacacagtccagtggggggctgggcaggagaaccgccttacacagtccagtggtggtgggctgggcaggagaactaccttacacacagtccagtggtggcaggctgagcaggggaaccaccttacacacagtccactggtggtgagctggttagggaaaccgccttacacacagtccagtgaggggctgggcaggagaaccgccttacacacagtccagtaggggactgggtaggagaaccaccttacacacagtccagtaggggactgggcaggggaactgccttacacagtccagtggtggtgggctggttagggaaaccgccttacacacagtccagtgggagctgggcaggagaaccaccttacacacagtcccagtgggggactgggcaagagaatcactttaccacagtccagtggagggcttggcaggggaaccaccttaccatagtccagagggggtctgggcaagagaatcactgtaccacagtccagtggcgggctgggctggagaaccacatggcccagcgtggccagctaggcaggagaactgcaagcacttgcctgaagcatgcagtttatagagcatttttgctttgcatcctctccctaacaacctccacctggcaaccttcatttaacccaaaagaaagggccttggtcctccatatggcctgtgttccactggacgggccaagggctcagatgtttctcataggtaaggaatgaatctctgagttggccactgcctgattctttagcatggaaatccacacacacattctggtgcatctaccacacagggtcgttctcagggtatgcttaacttattgctgtcaagtgtgtctaccatgcactgtgattttctatttaatgcatgccccagtgagcattttctttgagcatcatatagtcctgaaaaagtttcagattttggaggatctgtctttgtatttagctcagatatttaaaaattgcactgcagagtaaccagatagcatgacgttcatataaaaacaggcacgtagaccaatggaacagaatagagaatccagaaataaatccatgtatttacagccaactgagtttcaacaaaagcaccaagaatacacattgaggaaaggacagtctcttcaatcaggggtgttgaggaaactggatatccatacgtagaggaataaaactggacccctatctctcaccatatacaaaaatcaactcaagatggattaaagacttaaactaaggctcgaaactataaaactactagaaagaacacttcaggacattggtctaggcaaagattttacagttaagacctcaaaagcacagacaacaaaaccaaaaatagacaaatgggcccatattaaactaaaaaggttttacaaagcaaaggaaacagtcaacaaagtggaaagacaatctattgaatgggagagaatatttgaaaactatttatctgatgagggactaatagccagaatatacaaggaactcaacagcaaaaaaaatttaaaaaaataaaaataaataaaaataaaataaccattaaaaagtaggcaaagggcatgaatagacattctcaacagaagacatacaaattgctaacaggcatataaaaaaatacccaacatcactaatcaccagggaaattcaaattaaaaccacaacgagctatcatcttacgccagagttagaacgggtatgcctggcttatttaacttaaggtaacataataacctccagttccattcatgttgctgctaatgacagccgttagaacagctatcattaaaaagataaaaaatatcattaaaaagataaaaaataacagatactgccaaggatgaggaaagatgggatctcttgtacactactggtgggaatgcaaattggtacagccactggggaaaccagtacagagacttctcagaaaactaaaaatagaacaaccataccatccagcaatcccactgctgggtatttatccaaacaaaaagaaatcaggatatcaaaagacatcaggccaggagcagtggctcacgcctgtaattccaacactttgggaggccaaggcaggtggatcacctgagatcaggagttcaagaccagcctggccaacatagcaaaactccgtctctacttaaaaatacaaaaacagggccaggcgcggtggtacacgcctgtaatcccagcactttgggaggcagaggcgggtggatcatgaggtcaggagtttgagaccagcctggccaacgtggtaaaaccccctctgtactaaaaatacaaaaatcagctgggcgtggtggtgggcgcctgtaatcccagctattcgggaggatgaggcaggagaatcacttgaacccgggaggtggaggttgcagtgagccgagattgtgccattgcacttcagcctgggcgacacagcaaggctccgtctcaaaaaaaaaaaaaaaaaaaagatatcaaagagatacctgtactcacacgtttactgcagcatgattcacaatagcaaaattatggaatcaacctaagtgtccatcaatggacaagtggataaaaaaatgcggtatatatacaccgtggaattctattcagcatgaaaaagaaagaaatcatgtcattagcagcaacatgaacggaactggaggttattatgttaagttaaataagccaggcatagaaagacaaagatcagtgttctcactgatatgtaggagctaaaaaagttgctctcgtggagatgagagtagatagttaactagaggctaggaagggtgtgtgggaaagaggggggatgaagagagtttggttaaggggtacaaacatacagttagacagaagatataagttcttttctttttttttaagacggagtctcgctgtgacacccaggctgaagtgcaatggcgcaatcttggctcacggcaacctccgtctcccgggttcaaccaattctcctgtctaagcctcagcctcccaagtagttgggactacaggtgcatgtcaccacgtctggctgatttttgtatttttagtagagacggtgtttcaccatattggtcaggctggtctcgaactcctgacctcaagtgatctgcccgcctcagcctcccaaagtgctgggattacaggcatgagccactgcgcccagccagaagatacaagttctaaagttggatagcagagcagagggattatagttagcaacaatatatcacacattttgaaacagctagaagaatgtttgttcccaacacacagcaatgactgacgctaaggttatggataccccaaataccctgacttatcaattattatacattctatacatgcaaccaaatatcacatctaccccataaatatgtaaaacattacgcgtcgattaaaaagtaaaataacacaagatgctctatttagacagggctagtttgctttggtgtccacaacttgtaggtcagtaactgctgtgtacatctatggatatcaaaagtccttaagggggccgggtgtcttggctggcacctgtaatcctagcagtttgggaggctgagatgggaggatcctttgaggtcaggagttcgagaccagcctggtcaacatggtgaaaccccgtctctactaaaaatacagaaatggccaggcgcaatggctcacgcctgtaatcccacaactttgggaggccgaggtgggcggatgatgggtaaggagattgagacaatgttggataacacagtgaaaccccgtctctattaaaaatacaaaataatagccaggcgtggtgtcgtgcacctgtagtctcagctacttgggaggctgaggcaggagaatggcatgaacccgggaggcggacgttgcagtgagccaagactgtgccactgcactccagcctgggtgacagagtgagactctgtctcaaaaaaacaaacaaacaaacaaacaaaaaaccagaaatatacttgggaggctgaggcaggagaatcgcttgaacccaggaggcagagggtacagtgagccgagatcacgccactgcactccagcctggagacagggcaagactccgtctctaaataaataaataagtctttaagggaggcctatattccaagggaattgcgaccctccttggtgggtctggcagcctaaccccaattgtgtttccaataggcgaaattcgggagttccaaaattggaccaggtcatggggcctggataccctgatgaagaactgctgccgtgtttcgacttgaggaaacctagaccagatacactctgcttcttagactcttattttcatgctaaaagcatacagtttagacctgtgctctcccatatggtagtcagtggacacatacagcccctcaatataaattaatccaaatgaaagaaccacttccgcagttgcaccagccacatgttagtggctaccgtactgggcgtcacaaaagtagaacattgccatcctcagagagttctactgggctgtgctgcctgagggcatctctccaggcattctttgctacagcttcacctccagctccctgacttagaaaagcctgggagcagagaaatgctgtcactgcatccaattccaccgtggatgcatcctcgagcacgtgaccgaagacacacagcgagggatgctttccaggggtgtttgcccacgtgtggggcttttcactgaaaagactctatctttggaaagggagaggcagaagacacagaacactggaaaacaagaggaagactcaggcaggagcaaggtagggcagatggagatgagagagaggagggaagtaggaaaagataataggagtagcatgtagaaaatggagtctagccgggcgcggtgtctcacgcctgtaatcccagcactttcagaggctgaggtgggtggatcacctgaggtgaggagttcgagaccagcctgaccaacatggagaaaccccaactctactaaaaatacaaaattagccgggcatggtggcacatgcctgtaatcccagctactcaggaggctgaattcagcaggagaattgcttgaacctgggaggcagaggttgtggtgagctgagatcataccagtgcactccagcctgggccatgagagtgaaactgcatctcaaaaacaaacaaagaaaagaaaaaagaaagaaagaaagagagaaagagaaagaaagaaaagaaaagagagagaaaaggaagaaagagggaaggaaggaaagaaagaaaagaaaagaaaaaaagaaaaagaaaagagaaaagagagtccagtagtgtcatcacaagtagaaaattcaagtgttgcaaaggattctttcccttaagatctatatgtaaaacaaccgactggcctgcagagaggctagaccaagtccacccaacgatctgcaagacagagggtcctctgagggtccactccctatggcccagggaagcagagagggaccccatccactcactgcctgcatgggaggctgcaatagagtgggggagccatgggagagaaattcaacagaaagtaaagacaaacttttccaagcagaaattaaaaaaaaatctgaaagtgcacgatgctggcaaggctatgggaaagcaggcactcctactcgctgctagcagaagtgtaagctagaacagtcttgttagaggcaatctggccctttctgtcaaaactacaaacacatatattctttgttccaacctttcaacctcagaaacttgcccttcagagaccctcacccacgtgcagaatgatggatatacgaggctatccacagcagcaacaggtaaaggtaacagagaaagattagaagcaacctttatgcccattggtgaaatgagtggggcaggcattaaacaggaggaggaagctcttcctattgactaaactccaagatatgttatatgatttaacaaaaagcatcagtagcaccagcaaggtgcagaagtatagaggggatacctgtgttcagaaaaccacagagatcgcatttttccgccccctacaacttgtgcctctcacttcccgacacacggtttcctgggttaaggaaaataaaatgaaacatatttggaaattcctggactacttctggaagtacccacaagaaactgatcacttgtttgccactcgggaagggaactgataggttgaggacagggatgggaaggagaccaacttttcactctacgttttttgtacctttcagatatcagacctgagcatatattacctatttgataagtataaaattaacagatatacttttgggtatacatactgaccaaacatacttctgtctcttttgtttctcaagatagggtcttgctatcttgcccaggctggagtgcagtggtgtgatcacagctcactgcagcctcaacctcccgggctcaagtgatcttcctgcctcagcctcccgagtagctggggctacaggcatgcaccaccacgcctggctaatctttttttttctttcattattttttgtagagatgggggtctccctatgttgcgcaggctgatctcaaactcctgggctcaagaaatcctcctgcctcagcctcttaaagtgctgagattacaggcatgagccaccatgcacttttccgtcaatgctacagtctcactgggaaggaagccagtgcctgccaggtgagtgggcccaggttaccagagcacacagccctgtgctcccaagatgcaacaggcccctcgttgtgccctgccctgcaatctggttcttcagaagaggagttcccaaatacctggtcctctgcaaatctgagctgtaaacaagccttggaaaggtcctccccttacctaaatcccagcttcagggtcccgtttctgactggggtgccaccaccaaaggcagggtatacacagccaccgagtgatcctctgcctgcttctcactccagggaagaaaatcaaagcaggtcccatggctgccgtctgataatcactatggacaccacacaccagccagcatcagggctgtgtccaattagccacccccataacaacaccatagcaacaaaggtaatattattgttctaaagagaagagaaaaaccacacacacacacacacacacacacacacacacacactgtgttgtgtgacagctttgaaagccacagagatcgcatttttccacaccctagaacttgtgcctctcacttcccgacacacagtttcctcaatgagaagtcacaggcttggggcaatctcctcttcacgccattccaagatgcgtgtccttcacaggaaactggcatgagaatgattctctggcaagccaggagtcagggctgcctcctcgctctgcctctgtggctggcagggctgggccagctgcagaccaacaggctgggggtcatgctccaagctgtcctctgtctgtctgtctgtctggctggctggctggctgcctctctgtgccagacccaagctggcactggggttttggtggttgcatcaatgagccacacgctaatctccagacctaaatgtggaaagcattaacccaaatgaaaagacataaattaggacgggggcttatgggatggaggaaaacagctcttctctgagcgagagcctgggctgttgcacaagagctgagtgagtcaccagccagcagagggaaggaccagggacggaaggagggaggggagccccccgtgggactggcgggtgcacaggcggggggaacgctgcaaaaacacagctgtaggttcataactaagcacacttcatcagcagtctgaaggagggtggggggcaaagtgtcacctcctccccaactcaggaagtgttgcaacacgtgtcctccccagagaagacagcagaaagaagtgttcctaactgttcaccctttacaggctgcagctgtgccccggggaagcacacctcagcacagagaaggcctctctcatccctccttgccccttcttggcagtgtccatacacttgggggtcccctagcatgaggtgtccattgtgggcacacaactcttgcccatacttattaccatttcttgtcttttcttcctttcctttttccaaactccccatcctccatactactgttgttaacaacaagacaaatcctttggtctcccccgcccctagtccctggggagaaccttataccttcccttaaaaccgtgccccactcaccaacctccccagccatgacagattccaaagctccaatatccaggcaaattcttagtaccttctacgagtgaggcacgctgtccctgggggtggcagtggagagaaggagctctcccaaacagatcatccaaccaggacttctgagacttagaagccctagaaatttgctcagcaccttggtgggacccctcacctctccagatcatcatcaaaatgaggttgggttggccggccatggtggctcacgactgtaatcccagcactttgggaagacaagggaagtgaatcatttgaagtcaggagttcaagaccagcctggccaacatggccaaaccccatctctactaaaagtacaaaaattagccgagtgtggtggcgtgtgcctgtggtcccagctactcaggaggctgaggcaggagaagaattgcttgaacccaggaggcggaggttgcagtgagctgagattgtaccactgcactccagcctaggggacagagtgagactcttgcctcaaaaaaaaaaaaatgttgggtttagagatcagctgggtcccttagactctgacagtgctcatctgtaagaaatgcatggaacaaaatgaatactctccagagtacctggctgctgcagggcttaccccggggaatgcaagctgaagaagagtgccctgggctgagcgggtctctgcaactggccgggctgctcacagccactgggtgctcaggaaaggtgaccagcagatagcaccagccgcatcctgccagggaagtcacttacaggagagctcttgcgggtagggagtgggtctgaagtggacttagagggcagctggcagagacaatgggaagagaaggtattccagaccaaggaatcattcattcatattcattcatttatttattcgacacaggtttcttgaacacctcttatacaccagacgcaggtttcgacactgggatacatcagttaacaagacaaagatccatgcctcagggagcttacattctagcaggggagatacacaacccacaacaagccagacagacaggtcaatgatccagttttgctggaaggtgataaatgatgagggggggaaaagaaaaaacagagcaaaggggtggacctgccagagtgagtgagagactgaaaggagataaagaggtctattcatatcctgaggctgctgtaacaaattcccatacactaacgggcttcaaacaatgaaaatttattatcttacagttctggaggtcaaaagtctgaaacaggtttcacagggctaaagtcaagatgtctgcagggctggctggttcctcctggaggctctaggagagaatccatttctttgcctttctcagcttctggagcccacccactttccctggctttcggccccttcctctcgtcactcagcctcttgcttccaacatcacatctcctaacactgattctggccctcctgcctccctctcataaggacccttggcttacactgggcccacgtggataatccaggattatctccccatctccggttctcaacttaatcacaactgcaaaatcccatctgccacagaaggtaacatattcacaggctccagagattagaaggtagacatcttcaggggaccattactcagcccccacagggagttgggctgcaaaggccctgatgaggaagcatgcctggaacatttaaagaaacaccacggaaggcggaggacagaggcaggagtgacacaggagtgagaccaacggggaggagcaggtgctgaggtcaggacagcaatggggacccaattatgtagcacctcatcagccactgtagggcttccgcgtcttcactctgccgacatggggcaccactggactgtggtaagcagaagcacgatgtgttcagacccttcctgtgaaaacaacagactagggaccagcagagcagccaggaggcgcctgcaacagcccggcagcattgtggtggcagctgtggctcagtccaaggctacagtggtagggtggtgagaagtgatcctgtgtttaaagatctgttttgcaagaagggccaacctgcattctcaacatgctgaatgtggaatgtgagaaaaaaaggggagtcaaggtttttgcctccagcggctggaaggacaaactagccatttactgagctgtgagaagccactgtagcccagacctgggctaggcaactgcgtcctggacaggacaagtggagatgtcaaggacacagctggacctacttgggtctgcacttttccccgagggtaacaggcagcaccaggaccctgttgctctccagggcgtggagacagccaagaccatcccggattacatttctaagtcagtcactcgttgcaagacaagatgatagagatggagtaaacagggatatcgcctgagccctcggtttctcagccaggtatttttccgcttctcacagcgcataaggtgggaaggaagtcatgggagcacagctggattctggaatgcagcccaaccacaggctcaaaatcctcatctgtgaacagctccactcactacctggtcagcctctccggcctgccctgggggccctcactgccctgccagtcaattccaaaaagccctcgtgggctgggcgcagtggctcacgcctgtaatcccaacactttgggaggccaaggctggtggatcccttgaggtccggagtttgaggccagcctggccaacacggtaaaaccccgtctctactaaaaatacaaaaattagccaggtgtgatggaggtagtcccagctaccctgggggctgaggcaggagaatcatttgaacccaggaggcggaggttacagtgagctgagattgcgccattgcactccagcctgggggacagagtgagactctgtctccaaaaaaaaaaaaaaaaaaaaaagcccttgtgtatctctgggctgtcttaacttatcaggggggtggtcctacccccggggcccagttaaccatgaggaccaagcaggcccagcgcaggtggccagcctgtgcagcacctcccagaggaggcaagtgttcccctcccactggacaccagcacaacgtacacatgccacatggtgacatgcactgtaagaggattcttacatctgtccccagggacagatggcactgctgagtgccttccgggcactttcagccattcattcatttgacaaatacttatggagcatataccatgcaccaggcgctgtttctaagtatctgggggcacatcaatgaaaaaagcagaagggaaataaacccttgctttcctggagtgacggctccagcatgaggtgggaatgggttgcggggagcagacactaaacacaataaaaaagtgaattctaaagaatgtcagaaggtgatcgggggaatagaacatggtaaagggaatcaggagttcagggtagactggagtgtgggtggcaattttagagagttcaagatgttacccttgctaaagatctttctagctcttctgctcactgtattgatttattccttcattaagtagttactgagtgctcaccgtgggcctggcccaggccctcagtgctctcatgaagctgacattttatttaaggagacagaggttaagacaactaattatagaaaggttagaaaagagcatgtctcaggggattcctacgaccatgccaatcatgacgaaacatgctaaacaagctgggggatgctcccaagagtgtccttgattcttgtttaaggtccaaggcccacttctctcctccttcctctcccaacacaccacaccctgagttagttagaactgctgtcttctcatctacaggaaatcacaactcagtggtttctctagaagctgcccactgtccttagaacttgcctggtgccaccccaaagcacctgctggtgttaggcctcctcagctaacttgacattccatgcttcagacccagcatatcttctttagaagcaccaagttcaacgagtgggtccttcaggctgtcttctcctggcagtgctgatccaagcacctgctgggcgagtttggttccttttgcctgactattctcacgcccagagccaggcagcctggggacagaggaagagcagaagaggatgtcacacccaggcacaccaggaggccaaacctgtttggcagctcaagcctctgaccacaagctggcactcgctttcggaagtgctaaccacaggcaggactgctagtgagcagagcaccaagggttttcctgctgggaagaaatgcaaggctggccttcatgcctgtccccctgcccccgccccgtgacaatccccccccagctctggacccgcccatctcttcccactccatatccagctggaagtgctggtccaggccccagtagaagacacagctaccaacagaaggtacggccaccaggagccaggccagccaccggccacctccctccattcttgcagaaatgcttccgctctcatcttcctcaaaagttgggaggatttgagagcagccagagtgttagctgtggaggatggggggccactgcctttcctcctggttcctctgctgagtctcccacaaatggttccacgagaccaggacggactcaatcctaagagtacgagtagaaggtctgttctcaaaagcacagtgaagggaggccaaggcgggtggatcacctgaggtcaggagttcgagaccagcctggccaacatggcgaaaaccccgtctctactaaaaataccaaaactagctgggtgtggtggcaggtgcctgtaatcccagctactcggggtgctgaggcagtagaatcgcttgaacctgggaggcggaggttgcagtgagccaagatcgcgtcattgcactccagcctgggggacaagagtgagactttgtctcaaaaacaaaacaacaacaacaacaaaaaagcacagcgaagattctcaggagggctgctcaggagcctgcaccctccaacagcttcccacgtgggcagccgggggagaggaaagggcaggctgctagggggagggagggtggagaacggcagctacggcagctgcccccacccctcctctcatcctttctcaccatttccttccttcacaactgccacatgaaagcaaaggcccactggaaccccaaggtgggcacgcagatgagtttcggatggcaggagtggcagagctgcaggagctgcaacggtcctccatctcctctctacgggctggggtgcagaagattggaatgtatacagccgccagtggttaagagcttgggctctaggccaggaactgtggctctcgcctgtaatcccagcactttgcgaggccg[134 bp omitted]gaggcaggagaatcgcttgaacccgggaggcagagattgcagtgagccaagactgggccactgcactccagcctgggcaacagagcaagactctgcctcaaaaaacaaataaaaaatttaaaaatttaaaaaaagaacttgggctctggagagagatggcctggttctgctactcactggctgggtgatgctggggaaattattaaactgctctgtgcctcagtttccccatgtgtcaaacaggcataagaatactacttacaggtctattgtgaggattaaatgagtgaatgaaggtccagtgcttaggccagtgtctggaaaatcatattatgtaaatgctgtctattattattaaatgctcctgaatcgacagatctgtttttaaaaattctctccacccacgaaacgatttgttcacctgtgggttgaggagataagtaaaagcatggggtattgaagatgcaacctcagaccaccaagcatgcttccctgtaccccgtcaacctctcccttgggcttccccagccccaagcctcccaaaaaagtctcacaagctcagaagatgcctgggtgccaccagtaccccagcatggaatgcaccccctcccacagtcatctcagaaaccactgagaccagttctcatgggggactttggaaggtagtgggcccaggctacctggaacctccaaaaacacgtgcctcgcctccaacaaaggcactgaggcacaatccgaaggccagccatacaacttccacactcaaacggcacacaccaaggcccaaaatagcatcagcaccatcatcaacgagatgtaaacagagggaggacacgactcactcctcctcgtacagtgtgacctgcatctcccgggagcacacttttatctgtgcacaccggtggtacccacccaggagatgatgcttctgaaactcctaaggccccaaaaccagccagcccctgtgttttcattcatccttccctcccactgaggggttgcaaacagagctctgtctttagccagcatcttctagaaaccctcatccttcctctccctcccagacacgtgcacactgagatcgagacccagacagcctccgttctaggcactttcccagtcagtttatgtgatggccctattcaaatactcaaaaacacacccattttctcagaacaaagcgagaaaggccccctgggacccgactcaacaacaactccctagcagaaggagcctcgccctccctggcgccctccctcaccctccctggctgactgctggtttgattaacagccatgaagaggggggttgaaagcctacccccacttgtggtgaaaagccccagctttcaatcacaactcctccatatggcaagttatttacctccacggagccttggttttttacccataaacccaaaacactacctcagacagttgtacaattaactgaaatatctagaacagtgcaagctgaagatcttttttttaaggctggctgggagaccccatgtttaaacataaaataaataaaatgaagtttttatatatttttatttattgattttgagacagagtctcactttgtcacccaggttggagtgcagtggcgtgatcatggctcattgtagcctcaacctcctgggctctgagcaatcctcccacctcagcctcctaagtagctgggactacaggtgcacaccaccacgcctggctgatttttttagattttgaggtgacggggtctcaccatgttgctcaggctggtctcaaactcctgggctcaagcaatcggcctgccttggcctacccaaagtgctgggattccaggcatgagccactgcatccggccttcaggtggggcatgtgctctccaggttgtggtgggcctcaagactcactggagtcacctgtcagactctggaaagcattgtttgtcatcctacttagagctgtggtccagagcatgttaaaacacagacagctgggctccactgccgggttctgagccagcaggtctggggcaggacctgggaatatgcagctccatccaacaagttcccaagagatgctggttctgttgctgctggtccagggaccacactttaagaagccctaccctagaatctgaaggctggaaagtacattaaaggtcacccagaatggttccaagaggagccagaatgtacccatgcctcttgcctggtccagtcctgctgttgatctgactctcagctcttccatcttgagcctcagacacaggcagggctaagggtgaaagccccaaaactctgatcatcactcaaacaatctgtggcccctactggtcctgtttatcatctctcagcacttttggggtccccaggctgttgcctccaacctccagccaccagccctcacctagagcttgctcccccaacaaacgtgggctccattctgcccgtccaggaatagacaccagtggctggaggaatcaaggcagggaggttggagtccaaggcccacaggtaagaggaggggcgcagcagagccctggaacagctgatttgagacaagcccctccatcttgagcagagcctggagacagtggttttcctggaggggggccccggacagacacacactgtacccagtgtccgggccacacaatgcacaagaggccagtggggcaggcagccagggcccactcatgccagtaccatctgggagcccttgccaggcctcgcagggctggctgaagaagctggactctgtcctggggcacagtcgtgctctattcttatctcaagggggaatgtgtgactctccttcccgtgaatgggggcccctgaggaggcggagtgggaaacagagccgccactgtgcctgggcgggctccccgcgcggctcccagctccaaccagcccctcgtggcggggccttgcactcaacaagaaaaggccaagctgaaggtggacatggaaatgacagtccagagcccagtgcaaactgcccctccctcactctgcaagacttgagcccgtgaggcctgaccagaaacacacactcactccctggagagacccaatgggacgggctcctaaaggaaagcgcagcctccacacaacacagttccttactaaatctcgaaggaaggaacccagacatcctaggcaccccacacatgcgcacaaatccccactggcagatcggggctctggcctgcctagctcccacagcacaccatttgcaggtggctacagatctcatgatttgctggctctctttcggcctgcaaatgccaggcttagccagcgaatggggcactggatattctcaaggacttggtacaacctttctaaagagcagtgtggggccgggcacagtggctcacgcctgtaatcccagcagtttgggggggagctgaggcatgtggatcacctaaggtcggagttggagaccagcctggccaacatggtgaaaccctgtctctactaaaaatacaaaaattagctgagcatggtggtgcgcacctgtaatcccagctactcaggaggctgaggcaagagaatcgcttgaacccgggaggtggaggttgcagtgagccgagttcgcgctactgcacttcagcctgggtgacagagtgagaatcctcaaaaaaattcaataaataaataaaaataaagagcagtatgacaccatgggtcaaaatgtgcacttgagtggtccacatttcctggaaattactctccgtgcaaaaagatatcatcacaaggaatggttatcttcagtaatttttaatagcagtaaaaaaaaaaaaagggggggtgtggaagaacctcagtgtccatcataaggggattgcaaattaatagtttatccaaattgtgactaacaaacactaaaacaaacctgtaaatatatttaatgatagaaatatattctgagaatattaaatttaaaaaaaataggtcaaggctgggcgcagtggctcatgcctatgatcccagcactttgggaggccaaggcagatggcttactggaggtcaggagttcaagatcagcctggccaacatggtgaaaccccatctctactaaaaacacaaaattagctgggtgtgatggtgtgcacctgtaatcccagctactcgggaggctgaggcaggagaatcgcttgaacatgggaggcagatgttgctgtgagccaagatggtgccattgcactcttgcactccagcctgggtgacaagagcgaaactccatcttaaaaaaaaaaagaaaaaaaaaaaaggtcaaacaactgtgtgtataatatgatcataaaaggataaaatggggattgttctttctttcccagttggatgaaagaggggagtaaagggtgatggggagatgaggagggaggagggcagggtggtgtagagaatgaggcccgggtgtgagggggtcagctgtgggtgggagccactggccactgggggaattagactaagtcttgtttagccttcctctggaagggccttaaaggatgatgaaaacatccggaaaatatttagctagtaaatctttcagaagcccctccaccctgtgttatttatataaacacttcccttccactcctctctaccctcacatacacccgccccgattcctatcacagacttggaatcagcagagccagagagagctggacaaggctggctccatgtgcgttctgaccaccacgggtgcaacccatctgtgcagtatgaagcctgcgctgatgtgttccctggcccccatcgcagagcagccctctgacctgccagggacccacagcaggggtcgggggtggtggccacactatttgggttccctggccaccaaatctccagcagtgattgtcccagggactcaaggaaggggaagggttaaatgggggagtcgcttctcagacaggagaaagtatttgctctaatcctgtccgttctcctggaacttcctggagttctcagggaagaaacccttaatgaatggtgtgagggaaagagaaatcacatgcacatgaatgtgtgcatgccacacacacacgctcacacacacactcatacactcacacacactcttgcacacacacccacacactcacgcacatgcacacacaaacgtgcaaacacgcacacacaaacacgcagatgcacacacgcgcgcgcgcacacgcactcatgcacacacgcacactcacacccactcacatacacacaaacacgtatcacacacgcacacacaagcacacacacaaagagcgcacacacgcagacatgcacacactctcgaaaacacacacattcacacacacacgctcacacacatgcagacacactcacacactcgcgcacacacatattctctctctcaagatcttcctcctgctcctgagaagtgcccagaattcggggaagccactcacttgttaaacaacagccttcttttgagggttaggagccagtcccagcgtggggcacggggaagagactatgctccggaaccaagccggctctgactctagtcccagtgagagcacagcagacagtgaaccagttctggcttcaaaccccagctctgccgcttaagctgtgtgaccttttttaacctctttgggtctctgtttcttcccctagagagtcctggtatccttgaagggagattgcatcagaggctgggagtctagaaacctgggtgtgagtgcaggctgtttactggcctgaaggttggagccagcctgctggtaggtgctggccagcaccttacattgtttgttgttgttgttagtttaaatcaattggcaacattacacaattgggagagtgtggatttccagctggccatgtgttcccaatgactggctgatgctccctgcattttgaaccctaaatcaagttagtttaaccttccacggctctggacagtgagttaacaggaagccctgggaagaagaaagcagtgcttccacgagcccctcctcagatgcagcctcagcttgcgtcaggggaacgcctggtttccaggggccccatgttgccctctcacttttgcacagcctgctgtgtaaagatgaaccaaacatggcccaggaagtgagtgtgccagctggggatgagcaggtcaggaggcggggagtattgcacaccgagtccacggcctggaggagacctgggctcaagttcctgtggggaacgctccatttttctttgccccagcacctcatcaaacagtcccacccagcagccctgaaagtattttagctgtgcactcacagagggacagactcagggccgcaggacacaatcctcattcaagaattttaattttaaagatactaatctgaaccaggaaaacaccagatcttgcgcagaaaatcccccgattccagggctctgatggaaagcaggggcagaaggccccctccaaggtgtgaaccgaccccagtctctgtccccctaaacccccaagactgggcaagctccaaccaggcgaagtggactaggagaggaatctctgagtaaatcgagtaaatcctggaatcccaagcatctccttggaaatgctgattaaacaccagaacccacgcaaagatctgagcaaattccaggaccaccactcgggccacataagctctcaacggagcacacacacacactgagtcagacccctaaacatctggggcttagctaatcctctgctctcaggcgttcagcttggatggactccgaggggaggcagcaccggcgagggattcagtccagtttccagggagcccagccaggcctgggagccagggctcggccctaccccggctggggcccccgagtcacacacggaggccatgcgtacatcctccccagccctcaccagcagttccggggcggctccagtgcccaacccacacatgggaggtggaggccacagtgctccaggattccactctgcggtgcagacttcgagaggaaacaatttcctaatccccttcctaaatcaaggccaagaaacaacttgtggagagtccacagacgactgttccctctgcctggttgtccctgtgctgacctctggctgctcccaggagccattagagggagtggacgggaggggtggatgggagacccacaaacccacagcccgggattccatacttgatacaatcagttctgagtatcaatccacagatcattgaattccaaagctagctgaggccaaatgcctccccctctcacccccttaactaggccagaacataaaacccagcatttcattacttacatttatgcaacaacatcccttgcctgttttcattttcagtgaaataagtgatcgttttgctttttcttttctcttttttttttttttttgagatagagtcacccacgctggagtgcagcggcgtgatctcggctcactgcaagctccgcctcccgggttcacaccattctcctgcctcagcctcccgagtagctgggattacaggcgcccaccac[184 bp omitted]cttttaacctaaataatcctgattgatttggtatctccctgtgggtcagcagacatatatgagaagacattttttcaccctttgacttaaataaataacataggtaagaggagccttgatagcaaaaacgccaagaccactcaatgggggaaagggccatcttttcaacaaactgctgcgatgagagatacaaacatacaaaagaatgaagctggactccttgctcacacggcatacaattaactcaaaatggatcaaaagactaaatgtaagagctaaaactagaacactcttggccaggcaccatggcttatgcctgtaatcccagcaacgatgggaggctgaggtaggtgcatcacttgagctcaggagtttgagaccagcctgggcaacgcaggaagacactatctctatgaaaggtttaaaaattagctgggcagggtggcacatgcctgtagtcccagctacttgggaggctgaggtgggaggattgtttgagaccggaaggtcaaggctgcagtgagctatgatcacaccactgcattacagcctgagtgacagtgagaccccatctcaaaaacaaaacaaaaaaactcttcaaaaaaataggtgtaaatcttcatgaccttcttagactaggtgatgccttcatagatatgacaccaaaagcacaaggaatcaaaggaaaaaatcggtaaactggtctttattgaaattactaacttttgtgttccaaaggacatcattaagaaagtgaaaagacaaaccacagaatgggagaaaaattttgcaaaccacgtatctgataagggacttttatctagaatatataaagaacacttacagcccaataattaaaagacattgataatgtaactcaattacaaaatgggc[138 bp omitted]ggtgaaaccacgtctctactaaaaatacaattagccaggtgtggtggcgcgcgcctgtaatcccagctacttgggaggctgaggcaggagaatctcttggacccgggaggtggaggttgcagtgagccaagatcgtgctgctgcactccagcctggatgacagagcaagactcagcctcaaaaaaaaaaacaaaaaaaaacaaaaaacaacaacaaaaaaacatgaatggtcaataaggcacaagaaaagatggccagccaacaccagtagtcttcagggaaatgcaaattaaaaccacagtgagataccacttcacacccactagaacagctatgatttaaaaaaaaaaaaaaaaaaacgtagataattaccaatgttggcaaggatatggaggcattggaaccctcatacgatcctggtggtacagcagccttggaaaacagcctggccattcctcaaaaggttaaacatacttaccacgtgacccagcaattccacccctggatatacatccaagaaaattaaaaacacatgtccacccaaaaacatgtacacaaacgttcataccaggattcctcctaaagagccaaaaagtagaaaccaaccaaatgatgcccaccaactgatgagcaaataaacaaaacgtgatctatccaaaccaatgaaccattattcagaaataaaaagaaatgaagtcctaatacatgctacaaggagaaagagcctcaaaaacattctgctaagtgaaacaagccagacacaaaaggctgcatattatattgttctatttataagcaatccccagaataggcaaatctatacagatggaaatagataagtggccgcctaaggaaggcgtggttggggggaacgggaagtgactgctaatgggaatggcattgctttttgaggtgctggaaatgttctaaaattgatgatggtaatgattgcacaactccatgaatgtactaaaaaccgatttatacactttacaggggtgaattgaatggtatgcaaattatatctccataaagccgttatcaaaacataaaaggtatcttgctgagtttgctattacttccacacccaagccaaggccacgactactttctgaaactcctccctgacccctccaggttacccagaacttttcttcctccccagcgtgcctcttgccacagctatatctagacctcgaagagcagcgcttacttggtctctgtttacctatgattactgagttttactttcccacctaaactttaagtttctgaacacagcggggcctgataattacagccaacattgct[138 bp omitted]atggcaaaaccctgtctctaccaaaaatacaaaaattagccaggcgtgtggcacatgcctgtaatcccagctacttgggaggctgaggcacaagaatcgcttgaacccgggaggcggaggttgcagtgagccaagatcacaccactgcactccagcctggacaacagagcgagactctgtctcaaaagaacaaaagaaaacaaaacaaagtctcatgtattcctgtattcctgcatgtatgaatacatgtactcatgaacatataacatgtactcagtgaatacatgtactcatgaatgtatgaatacatgtgctcatgaatgtatatactcatgaatgtatgaaaacatgtactcatgaatacataaatagacgggctcgagaatgaatacatgtgctcatgagtgtattaaaacatgacatgaatgtataaaaatgtgctcatgaatgcatgaaaacatgtagtcataaatgtataaaaatgtactgactgcatgaaaaggtactcatgaatgaatacatgtgctcatgagtgtattaaaacatgaacgtataaaaacatgttaatgcatgaaaacgtactcatgaacatatgaatacatgtactgacaaatgtataaaaacatgtactcaatacatgtactcgtgaaggtatgaaaatgtactcaatgattgcatgagtactgcatgaaaatgtacgcatgaatgtatgaatacatgtactcgtgaacgtatggatacgtgctcacgtactcacaattctttcacttaccccttttgtttcctaaacatctggtgcccataactaaatacttcttattcagatttacctgatctttgctcaggtgatgatagctggcaccttctcccctgaagaatgcctcttccttttaaacctggtctaacttgctgatcttcaacctcaccccaccaccctacgtgcacacccatcatctcagtctttgtctactcgggcctgactccgtctccatgtggtatcacatttaaagaaacatcactcaagcatcattcaaaaattatttttggccaggcacggtggctcatgcccataatcccagcactttgggaggccgaggt[132 bp omitted]gaggcacgagagtcgcttgaacccaggaggcggagggtgcagtgagccaagattgtaccagtctgggcgacagagtaagaccctgtctcaactaaaaaaaaaaatcatttttaaagcaatttaatctttaaagtctcttttaaaaaggctgggggaggggcttcattcataacatgtagcaacatttaaaatttcatccccttctttcaaactgactcacaggcttagcagctgcacctccgacctccaccccaacatccctttccttcttttcaccgaaagactttaaattcctcccaagcccctctgacttggtctttctcccctgcaggcatccttctctgaaagacacacagaccaacagacagaccaactctctcacatatacccctcccttcaaaatcagtcctgtctacttttttcaaattttataattagattatatatttttatattttttttttttcttttttgagatggagtctcgctctgtcgcccaggttgagatcgtgcagtggcactcagctcactgcaacctccacctcctgggttcaagtgattctcctatctcagtctcccaagtagccaggattataggcaggtgccactacacccagctaaactttgtatttttggtagagacagggtttc[132 bp omitted]tgtatatatttatggtgtacaacatatatttatggtgtacatacactgtggagtggctcaactgagctcattaatctacgcattactccacatacttatttgtggtgagaacaattaaaatccactcttttagcaatttttaaaatataatacgctattattaactatagtcaccatttcctgaacttaatcctcctaactaaattttgtgttctttgaccagcatattccccacccgcaacccatagccccaccccacccagcccctggtgatcaccattctactctttgcttctatgagttcaacttttttagagtccacatataaatgagatcacatggtatttatctttctgtggcctggcttatttcactttgcataatgtcctctgggttgatccatgttgtcacaaatgataggattttctctttttttaaggtggaatagtttgccattgtgtatatatacaggttgggcattccatacccaaaaatccaaaaccaaaatgctccaatgaccattttctttgagcatcatgacagcactgatttgggatgcctgacctgtaccacattttcttttttcttttttttttgagatgggagtctcgctctatcgcccaggctggagtccagtggcgcgatctccgctcactgcaagctctgcctcccgggttcatgccattctcctgcttcagcct[207 bp omitted]gggctattgtgaacaggactcaatgaacacaggagggcagacgcctcttccatatagattttatttccttcggatatatacccagtagtgggatccctggatagtatggtaattctatttttaattttttgtggaacctccatcctgttttccgtaatagctgaactgatttatattccccaccaacactgtgcaaagatcccttttgctctacaaggactggccctttctcttatcctgaaattgatctaggacaggtgagccccaaagtggggcctaccccataagggttcttggcttcccccaggaaagaattcaagggcaatccatgtggtaggatggaagaaaacaactctattgaagccacagggttatagccctgtgactatagccctgtgaccgccgctgcagagcagggctaccccctgggcagacagtagaagctcggggcagttctgcactcatatttacatccactttttttttttttttaagacagtctctcgccctatcgccaggctggagtgcagtggtacaatctcggctcactgtcacctccggctcccaagttcaagtgattctcctgcctcagc[131 bp omitted]gcctcccaaagtgctaggattacaggtgtgagccaacgcagcccggcctacatcctcttttaattacatgtagattaaagggcagtttacacagaaatttctaggaaaaaggtggtaattctggggtcctcagtcagtgccatggaaagaggcagtaatccccaggtgttgccatggcaatggtaaaatgacctggcgcagtggtgggtgtgtgttttggaaagctgcttccaccctgcctctgttttagctagtcttcaatttggctgggtgtccaaggcccacctccagagtcaagtcccaccttctgcttcaaaaccagcttttcagacctctgcaatgttgtccctctgtccattgctcagactggctcttcaccagaaagtccagggactgagcccgcccgagagatttctcttcgattaagggggtgagcagctataaatgcccccatcacgctctgctggtttatatctgtttaagttcctgatctcgtcttttaatgttgtttttaatgtgtggtttcccatctccacgtggtgggaataagccagcagagagggcacaatgccttctttttctttcctatccacccacagctctggtaccacctctgagctccatgtccaataagcttatgagacccactgcagacatccacagacctccgaactggggggaggggggtacccaccagcaaaggaggatgttttcaatgctcaggcctggatgcctatgctctgagaaggaaataaattgtcagcagaagatcaacagagaactcaacttagcagaaaacagtaggggaagacttgaggctgtaatattagggagagatgaagacgagactttttggagttcagatgtggggagacagtttaaagaacaagagcatgacttagcgagttggccccactgagcaggggggtggttcagctcggaacaacaccaaggaccgtctgaagggaccagacactccgaataaaaacaaatgcctcccaaatgttgtctccgtcttctattaattaatcacaatgtccccatggcgaagtgtcctatgactaatgcaaactgtaactgtgtggcatgaggccaacttgctcatcttcctttctgaacaagcctccccagatccacgggggaggctgggtgagtggggagccacttcctctgggtatcagatcaaaccatgaaatctgtttctgggttgggcctcagaaaagaatttctcctggggacatccaaaccctttagttatttttgacacttagtccagccagaggtttggagagttgctggggctaagctcggggtttctcccaactccgcatcaacggtgctgtggaaaaggcaagccagattttccagactggggaaggcagcgcggctgatgcattttcttctcacaggaaaagccaactagctgtcccaaagatgagatcttcaatgcactgcaaatccagacagcacctcctgcaaaaagggactcaaatcctccacatgacaccatctccactgttatcatcccagactgagtgacccctcgcatctgtccgtctgcctcaatttaaaaccagcttcaacctattctgcatggggcagccagcgtgatcctgcaagacacgaagactgattgtgtcgcctacagctcaccagcctccaaaggcttcccttcacgcttagaaaaaaacagtgggagggacacaaattcctccattatctgaccctctttgacctcttagacctcaaatctggccaggcatcgtggctcacgcctgtaaaaatcccagctctctgggaggctgaggcaggaggatcacctgagtctagaagttcaagaccagcatgggaaagatggcgaaaccccgtctctacaaaaaattagtcagacatggtggcgcacacctgtagtcccagctacccaggaggctgaggtgggagaatcacttgattccaggaggcagaggttgcactgagctgagatcacgccactgcactacagcctgggcaaccgagcgagacccagcttaaaaagaaaaaaagagagagagagagaccgcaaatactctccctctcctacctgctcacccaactcgagcttcgtgggcatcaccgccattcctcagggtctttgcacttgctgtttcctctgcctggaaccttcttccccagatttccatatggctcattccctctccattaagttctctgctccaatgtcacctcagagaggtcttttctgactaccccatttaaagtaaacttccccacaacctgcccccctcaccctcacccctctcccccactttatttatcttcatagtatatatagcttagctgacatgtatatgagtgtttgtttcttagaatgtaagctgcacagtgcagggaatttgcctactttgtaactgctgtattccctgtgtctagaacaattcctagcacagtgaagttttctcttttttttttttttgagacagagtttcactcttgttgcccaagctggagtacaatggcaggatcttggctcactgcagcttctgcctcttgggttcaagcaattctcctgcctcagcctcctaagtagctgggattacaggtgcatgccaccacaccaagctaattttttgtatttttagtagagacggggttttgccatgttggtcaggctggtctcgaactcctggcctcaggtcatctgcccaccctggcctcccaaagtgctgggattacaagcgtgagctaccgcgccagaccacattgaagtttcttaataaatatttgttggaagaagggagggagggaaaggaaagagtttttggttgaccaaggtacagtaaataagatcaggtcccttcattttatacttttttcaaggttttttttttctttttttgagacggagtcttgcttctgttgcccaggctggaatgcagtggcacaatcttggctcactgcaagctccatctcccgggttcatgccattctcctgcctcagcctcccgagtagctgggactacaggcgcccaccacagcgcccagctaatttttttttgtatttttagtagagaccgg[146 bp omitted]aaggaaggacttcttaactcatgattatccttccaactccctagtaaggaagggaggacatgcataactatcgccattttacagaaaaggaaatatgaatgtgggatatttgttaaagggaataataaaacatactggcttgtccaggtcaaatttgaaattaaaaaaccaaactagaggctggacgcagtggctcacgcctgtattaccagcactttgggaagccgaggtgggcagatcatggggtcaggagtttgagaccagcctgaccaacatggtgaaaccccgtctctactaaaaagtacaaaaaaaattagccaggcatggtggtgcacacctgtaatcccagctactcaggaggctgaggcaggagaatcgcttgaacccgggaggtggaggttgcagtaagccgagatcgtgccactgcactccagcctgggcgacacagagagactccgtctcaaaaaaaaacaaaaacaaaacaaaacaaaaaaaacaaacctagaactagaatcgaggtttccaggtactctgtcctatgctctttccatcaagtcaccttggatttcaatattctatcctgctagaaagtctattcatattgttaatcatattaatatttcaaaaatgaaaaaaatatatgatcatcttgagagatgctgacaagacatcatttgataaaatcccacatctatttgtgcctttaaaaatacctcttcttggtattagcgccagcctagttttatattctccaggaagacactgaaaaacagacacaaaaaggacattaaaatgctaaatagaaaatataaatgctatctaaaaccaacagccagtatcggagttatgaggaaactccagaggaattcccactaaagacaggaacacagctatttattagcaacattctggaaccatgtatcatctataaccaattttaaaacataactaaatttcactcacaataacaagaagaaattatcaacatcctaagaataaacctaacacaaggaacatacaagccctacgtgaagaaaccatttgtccaggggacagagtctaacttaattatgtagagatattatgttcctggttagtatcaagaactgtgaaaggtctgagatttcttatcccaggtccaggagcaaagtgagatactcaacattcttaattccatttaatctaattaataactctgcaatttgtattattattccccactaatgaagaggcacagatcagataatttcacacagcaaggaagtcaggattacaatttaaatagttctgactcccaagcctactgtcttcctaccagctcactcaatcttctagcaatgtgatggctttctactgtgtcaacatggctaggctgaacttcagttcccagaattcctttccttatacattctgcttagcgtagaccacaggaagatttctgggagatatggtgcgggaaagggaagaagcagagattctgcagctcaaacacattgttgctgatctgctgacttgcctcactggcataaagcagtggctaggcccacaactgctccaccctctcctggagcttttgtcagcttatccaacccctgagccaggatacattggttaggtccatgacacagggccccagattctgcaggatacccacactatcaaagtcaaagacaattttattccatccttgtggggttccagctcatgcccacaggttctagcctgctcatgatcttctcttcttaacttcacctttcccgtagacttcaagctccagcatcagacattgaaatgacagcccaacagagactacttagccagccccacaatgacataagactaatattctgtaaaaactctcttttaaaatgcaggggctggacatggtggctcacatctgcaatcccagcactttaggaggtcaaggcgggaggactgcgtgtgcctaggagatcaagagcagcttgtgcaacatatggaaaccctatctctacaaacaatttaaaaattcgccaggcatggtggggcatgcctgtggtttcagctacctgggaggctacggtgggaacatcatttgagtccgggggttgaggctgcagtgagccgtgactgccactgcactccagcctgggtgacagggcgagaccctgtctcaaaaataagtcaataaataaaaatgtgtatatctgcatttgtgtgtgtgtacctgtgtgtctatgtctatgtgtgtatatacatgtgtgtctgtggctatatgcacgtatgtctatatagctagtgtatgtgtctacaactgcatgtgtgtttatgtacatgaatatgcctacatctacgtttctgtctgtttctcctactcattctgcttctccatgcaaaccctgactgacacagctaattgctcctcactgtaagtccacagaataggtggtcatggagtgggagtgtccctagagaagctggagatggaatgctgaaggctggggtagtggaaagccgtggagactcagtctgctactctgcccctctaggctaacagattaaaacaaaaagagtcacttgtatgtgcacaacactgcagatacaaatgctaaagatgcagggtcccacactggccactatgcctcaatggctcccccaagcagggagtgggacacagaggggtctccatcaatactgccagcttctggactggccccaccctggtgtgcacccagctatgcccctctgacagccacagaaaggctgcttctggggacccagggaagtggctccagggccctggccctgactcacttctggaatttcctgccttgggaagctg[133 bp omitted]ctaacacagtgaaacccgtctctactaaaaatacaaaaatttagcctagcgtggtggcgggagcctgtagtcccagctactcgggaggctgaggcaggagaatggtgtgaacccgggagacggagcttgcagtgaggcaagatcgcaccggtgcactccagcctgggcaacagcaagactgtgccaaaaaaaaaaaggccactgcttgaatgagtgcctgagcacccctgaagagacacacccagattcccagggtagatccaagtcccactaagacctgcagctctcagttactccctccacagagcccggctccaaagagggaggagacgcagtttcctaaaatgtgcaggcccaacaaggcagcatcaaggccaaagctctggaatcacagactccagggcacattccagctctgccagatactaacataaatggccttgggcaagttctggtacctctctacaccttgaattccccacctttaaaatgtgtatgatagataccatacaatgcaacactgtggaaagggttaaacttttacattttctttaaaaataaagtataataaatgttatttttgttaagattaacacttttcagaataactctgtcaagctcatggtgatgagtcagtaggcactgcctaa[131 bp omitted]aacatggtgaaaccccgtctctactaaaaacacaaaaaattagccgggcgtggtggcaggtgcctgtagtcccagctgaggcaggagaatggcgtgaacccgggaggcggagcttgcagtgagccgaaatagggccactgcagtccggcctgggcgacacagcgagactctgtctcaaaaaaaaaaaacaaaaaaaggtacatagtagttacaaagataactaccagaactaaaagcagattgtaaatctttcaaattattggaagaaatgtacacacaaagtcaataaaactgatcatatagtaaataacatattattaaaggttttgtttgtttgtttgttttttgagacagagtctcactctgttgaccaggctggagtgcagtggcacgatcttggctcactgtaacctctgcctcccaggttcaagtgattctctggcctcagcctcccgagtagctgggactacaggagcgcaccaccactaccagctaattttcgtatttttagtagagacggggtttcaccatgttcgccaggacctcaggtgatcagcccgcctcggcctccccaagtcctgggattacaggcatgagccaccgtgcctggcctattaaaggtttaaaaacagaaaacataacataaaatgacagaactaaaaccaatcataactcttacagaaaaagattctgaggtatccccaatatatttcaaacttagataattttttaattggttgcaaccttgatccacccaaacagttctatatgaggatgcaggctgaactcacgggggttcagacatcagtaacagggagtgtgtcatgaacttgaactgtgtcctcccaatccaaaaaacaaaaaatctagcctgtaatccccgcactttgggaggccaaggtggccggatcacctgaggtcaggagttcgagaccagcctggccaacatggcgaaaccccatctctactaaaaatacaaaaaaaaaaaaaaaattagccaggcataatggtgggtgcctgtaatcccagctacctgggaggctgaggcgggagaatcgcttgaacccgggactcggaggtttcagtgagctgagattgtgccgctacattccagcctgggcgacagagacagactccgtctcagaaaagacaaaaaaaatctgtatgttgaagtcttaacccctagtaactctagatgtgactataattggagataggcggccaagcgtggtggttcacacctgcaatcccagcactttgggaggcagaggtgggtggatcacctgaggtcaggagttcaagaccagcctggccaacatggtgaaaccccatctctactaaaaatacaaaaaattagctgggtatgttgtgtgtcccctataatcccagctactcagaaggctgaggcaggacaatcagttgaacccaggaggcagaggttgcagtgagccgagatcatgccattgcactacagcctgggcaacgagagaaaaattccgtctcaaaaaaaaaaaaaaaaaattggacataaaggtaattaggttaaaatggggtcatgagagtggtcctaatccaacatgcctggtgtccttataagaagaggaaattaggatacaggatacagacaggtacagagggaggaccacgtgaggacacatggagaaaacaagccaagaagagcgacctcagaagaaactaacctgttgacatttatggtctcagacttgtagtctctagaattgcaagaaaacagattctgttgtttaagccccacaatccatggtactttgttaaggtggccctagcaaactcacacgtgtctgtcaggttgcatgggcaaggagggtgtcacagttagtgccaagcatgtgagtgtgctggaaaatggaagtgacaaggagggggcttaaggtaggcccatccccacccattccccacctagcccagagcctcaaagctgttggcaggaagagctaagaatactcagagctctgccaggcagtgggctccatattccagcagcttggagcagggaacgggggactcggagcggcagaaaagcaaggcctgctggcaagatgtgattgcaggagactctagtaactcaaggactgtggggtacagagaaggctagtgactgtttcccctttggggtcctgttcaaagctggggactttgcagctgtgcccacctgctagttttactctccctaaaacagagccaggtatgtgttctgaccatggctgccgaaagacgcccaggaggacaggtgagcctctgcttctcataggcagtgtcgggcccgtgatattatcccaaagtgaaggggaacaaccatgctcagagcaggacaggccccaagaggcatttttggggcccttaaattctatcaaagttttaagatcaacccaaaatgagtggccaatctcggcagatccccagtatcaggtaagaaaggatctggtaaattattacacaaatccttttctgtggatgttaatttcttttttttcttttttcttttaagacagacatgctctctcgtccaggctggagtacagtggcgcaatcacggctcactgcagctttgacctccagggctcaggcaatcctcccacctcagccccctaagtagttgggaccacaggcatgcaccagcatgcccagataattttggaaaacattttttctagagataggatcttgctatgttgcccaggctgttcttgaactcctgggctcaagcaatcctcccaccttgacctcccaaagcactgggattacaggcgtgagccactgcgcctggccagttgttacatttctaaaaaaaaagtcttttatgtctttgagctaggtaagaactgcatggcaggtacaacaggccagatcaatagttcctgcccgtctctgattagaaccttctagaaaccaaaccataatcagagacaggcaactggatgaggaaggacggaacaatacatgacagaaggagttagtaggttccaaacggtggctgggccatggtgcaggaatggctgctgcccccaggcagaaaggagaagaccaacagaaatccacagccccacactggcagacagcctggctcagctcagggctgcagacgccctggtgtctggggctgacagccagcagcaccggggcaggtactgctaaggaaaagaaccgcagagacgcctgcattcaatgctcaagtgcacatcaaaaggaaagaaaacactctctgtatatcagagaagcacgggggaaagtacacaggaaggaaaatggaacttcagggttcctctggagcaagtcatgcctgggtgaatctaaagaaaaggtgactggaggaagctcaggcagtgtgtaagacccgaagagctctccaggcgctcactgtcagaaaagttagctctaggaaggaggcagtagaggcttggatgaaaccttacaaggccctagaaccaggccctggtggcctgtcctgggcaacattgaggataaacagcactcaggccccccaggaccaagttctgagttcctgcagcagcagcagccggatctgtgccccaatcctggcatgggttcagggggcattggcagttccgctgtttctgccagggatacaaccacgcttgctgctgaacggacagtatagctgggccaggtgggggaggtgggctttaggggccagggcagatggcccaggagtcaactgagggaagggggaaacagcaatatattctaagacccccccagaaatgagagacacctcccagctctctaagggcagtaaccctggagttcaatgaagtggaatggctcattattttgtttttgtgggagcaagaacaaccatctcaacaatgagaacttgcccccgtagtcccaaagccaggatcttcgtgggagggttccagagggtgaggcccaggccctctgaaccagcagacccttgtcatggatcaggtcctgcgctgatggaccttgagagaatggtggctacagaggacaaatccagaaaaggcatccacacacatgcaagaaggcagaggaagcatctggttctccccaaactcgggggtaaaactgtccacatcgagcaccaaggcaccctgaacttccacagaaccaagttagataatcccagaactttgaggtatctgggcccaaaactagtattaaattgaaggcgcagataagaaatggaatgttttcactttttatagcccagtgtgcccaaccagtccatcaaacccaccttcttcccggggcaaccctagaaaagatgtctcactcaaagacagccctggagagcaagtcctggccaagttttcccaattatgactgcatttcacatctttctttacaaggcaaagtccccgcaagagtcagggagtgaatcctccagagcctcgccacttagtgtggaccacagaccagcagcaccagaatcacctgggaacttgccagaagtacagttgttcaagccccactccaaacctactgaaccagcagctctgggaggaggcccagcaatcagggtttaaacactccctccaggagactgtgatgctctctcagcttggacgctttcaaaactgaccacctcagtatgaaacaggctaaaccat[135 bp omitted]cccatctctactaaaaatacaaaaaattagccgggcgtggtggcgggtgcctgtagtcccagctactcgggaggctgaggcagaatggcataaacccgggaggcggagtttgtagtgagctgagatcgcgccagagcgagactccgtctcataaaaaaaacgatctctgtcttcctgtagttagacaataaaaattccttcatttaggacctactgtctctgaatctgtactcctgtgggcattcgaaattgagatttacctattaagtcaagaattacagtaagcaagaaagaagccaaaagccctcttcaaatgcttagtcacatggtttgccattttttttaatatgttaattacaaactactgatccatacctactcaattagcttttaagcactgaaaagtactttgttcaacatacttgcacatattccactgtgtgcctggtttatggcttttgaataaacaaataggtgttttcatacttccaggcaaagccagcagtggggcttgggtgggggcagagggtggcgtgtatgtgtctgcgtgtttaatcacagcgaagtataatacacaactgcctctctgaaatttacaaaaatgctcagacaacctcaattaagctgatttctaaaatacgcagacaaaaggaaacatcctcaaagtttctgtaaacggtttttgagcccacagctgagcctctccaccagtctggaatttactagctactcaaaataacaggaacatcctaatattgcctcttacagctcaaaagtaaggcttttagatcagccaagggggctaagaaacctcacatgcatgaacacagaaaatacacttgtaaaaatatactgggcaagtgggcttgtacacacgtgttgggatcaagggtacaacacggcatttctctctcatgccaaagatccaaatatgatgtttatcgaagcttcccaaagccaagctcaaactctattaatgtgaatcttgggggaaaaaatcagagtacctttatctagattttttaaaacggtgtgaacactgccaagagctcataataaaaagagtacagaactccaagtcaaaaggtctgaatgccaagtctgtcttttaccaactgccacttcctaacctggccgcaaatcacaaattctgaacctcccatgtccccagctgaaaaatcaagatgatggaaatagtaactgcttgttggagctcaaggagctgctgtgagagccgatcatgtatctcatgtgagagcacctgaaaaatcataaagcacacgtgaacatcaattattggctagcacaggcatttttgatttaggagcttgagaaagagggagtcaaaaaaagaacacagtttttttgcacttttatgtttcttggttgtgttctggtgttggaggttatttttgtggggtgaaaagctgcctcgttggtttcggttaacctagacctttcttcacctgcatcccttggataactgtttgctgctggttaagaatcctctctcagttaagagccagacgcagcggctcacacctgcaatcccagcactttgggaggtcatggtgggtggatcacaaggtcaggagatcaagaccagcatggccaatatggtgaaaccccgtctctactaaaattacaaaaaaaaaaaaaattagccaggcgtggtggtgcatgcctgtagtcccagctactctggaggctgagacaggagaattactcgaacccgggaggcggaggttgcagtgagccaagattgcaccactgcactccagcctgggcaacagagaaacactcaagaaaaaaaaaaaaaaaggccagg[138 bp omitted]tggcgggtgcctgcagtcccagctactccggaggctgaggcaggagaatggcatgaacctgggaggcggagcttgcagtgagcagagatggtgtcactgcactccaacctgggcgacagagaaagactccgcctcaaaaaaaaaaaaaaaaagaatcctctcttgaacagaacggtatcaggtcaactggatgatgaataaatgatggagaaccctggcccatatgatccaataaaccatcttcctgctccagaaggttgctgcaaggcatgtcagcctaaatagaagaggatccatttttgttcatttttatgtatttattttgttttatttattcatttattttgaaacagagtcttgctctatcacccagactggagtgcagtggtgcgatcttggctcacttcaaccttcatctcctgggtttaagcgattctgctgcctgagcctacagagtagctgggattacaggtgcccgccaccatgcccaactaatttttgtatttttagtagagacagggttttgccacattagccaggctggtcccaaactcctgacctcagttgatccacccgccttggcctcccaaagtgctgggattacagacgtgagccaccgcgcccggccccattttgaaataacatatctcaccttatagaattttaggatactgcagccgaagaacacaaaaaccaacttatatttttgtgactttccatcaattccatttgaggattagaggtggaaaagaggtagaaacagtttggcagttctttattaagcacagagtcctcatacaatctagtaattccactcctagctagagacccaagagaactgaaaacatgtcccacaaaaaaacttgtacaccaatgtttgtcacagcattattcacaatagctagaaagtataaccaattcacatgtccatccactgatggacaggtaaaacgtggcatatcgggataatggaatattattcagccatgaaaaggaatgaagtgctgatgcatgttacaatacagataaacctcgaaaacattacactaagtgaaataagccagacacaaaaggccagatatcatgtaacattattctgtttctatgaaatgcctagaataggcaaatccacagagacagaaatcgattagtagttgttggttgttaggggtaaggagatggggtgaatggggagtgacagctaacagggaaggggtttctttctgaggtgatggaagtgttctgcagttagtgaatatattagaatactacacagtgaatatactataaaccactgaactgtatactgtagagagctgagttttacgttatgtgaataacatctcaataaagaaaaaaatattaactattttttaaagacctagaaatagtggttaaccaactaatcaggaattaaaagggcagcataccaggtgatgactcattcaccaactcccaagaggaagtgtggttgtgacatttacgttgatttcatctgacctccaacctcaaaccccaggcactctcttgcacacttcaactttccgttttcctttctcccttccgcccattcccctttgactctttccttttcttcctctccttttcttctctttctttctttctctcaactggttaagtacacacacacacacacacacacacacacacacacacaaagtgtaaatggatacagtgaaggtagtgggcttttgaaatgtaacttttctccttgcctatagaagttgttgaatgaacacctatgagaggcagcaaattggagtcatctggactcagtaatgaggctgttacatttcttttttttttttttttagacagggtctcactctcttgcccagactggagtgcagtggcacgatctcggctcactgcaacctctgcctcacaggctcaagcaattctcctgcctcagcctcccgagtagctgggattacaggcatgcatcactaccgcccagctaattttatatttttaatacagacagggtttcaccatgttggccaggct[136 bp omitted]gtgagcaagtcactttacttctgtgcctcagtttccccacctgtaaaatggggacaatagtagaacctaacgcatgaagttgttgttaggattaaaaagaatagaacaaagcttgacacccagcaagtgctctacaaaaaagtagaagcctgtgaactgaggctggttctgaggttccctggacctgacttaaaagcatatttccagatgtcagacttcttctttttttaagtttggttatttttttttagagatggggtcttgctctgttgcccaagctgatttcaaactcctgggctcaagtggttctcctgcctcagccctgctagtagctgggactataggcacaggccaacataccaagttaaagggtttcgtttgcttgtttttgtttttgttttttttttaaatacttgtcactgatgaagctcagatgaagcctcttttaagtattgttttctaacaatactgttttctaacaaaactgtcacatgttcatttttcttggtgatattttatcttgttattaaatattattctacgtcatttaatgacagcatttaatgtgattataagagtctatcatcaatctacgtacctacctaccatctatctatttatttacagatagggcctcactctgtcatccaggctggagtgcaatggcatgatcatggctcactgcaaccttgacatccttggctcaagtgagtctcccacctaagcctcctgaatagctagggctacaggtgtacaccaccatgcccagctactttttttattttttacagagaaagggtttccctaatgttgcccaagctagtcttgaactcctggcttcaagcgctcctcctgcctcggcctcccaaagtgctaggattacaagcacgagccaccataacccaacctaaataaagttttccagttttgacttttacttctgacaccctttcagtttccctttgttaatggaagaagagagagaatcactgctgcattccaaaatggaaggaaaagagagccaggactttcagttgccagtggcagaaatccaatccacaagtttaagccaacacaaaggaggatttatcagcatgcatcactggagttcagtgatgcctggttccagggactcacacaatgtctacaggacatcttctctcacctctgactggctgtcacgtgtaggtggactctgccccaactagagagccactggtaacttcctcccaacttagcaacgtatcttggttgacaagccccaccaaagtcacatggcggggtgagaatagggaagttccccgaaaagatgggagatagaacattatgacaggcagatcaaaacagaagctgtaccaatccactttagtcagcaatcgactccccaagagaatcttattgaggaacgattctgtgctcagcaccgtctaaggcatgcaggcggaacacagaaggattcatcacaataccttgactttgtaaagcatcacttcccagtgaagaattgactgtgcgtgcattagctcttaacccttagagttcccagtacttagcttaatttcacacatgacaaaaggagacccacctagaccgagtgactcattcaaggtcacacagccaagatgtgactccagatagacattcccccagtccagtgcctcgtccactgctgccgtgtgcaaggggccatgttaaacatgacggtggagagcaagatggcagaggaggagacgcagccttcaaggcctctctatattaacataaatgctccaatctgtcaattcagggtggcatgtgcaggtgccgcttaggtgcctcctcccaaggaagacaaggccctgagagctgaagatgagcaagagtttctagaggaggactttgcaggatgcagggagatggtgaggagggccagacaggccaagcaagggtaggtgcgtggccatttcttacacttcttcagaaatcaatgagaaacctggctgggcacagtggctcacacctgtaatacccagcactttgggaggcgggtggattatctgaggtcaggaatttgagaccagcctgaccaacatggtaaaaccccatccccactaaaaatacaaaaaaaaaaaaaaaaaaaaattagctgggcatagtggcgggcacctgtaatcccagctactcagggtagcttaggcaggagaattgcttgaacccaggaggaggaggttacactgagccaagatcacgccattacactcc[135 bp omitted]gagaccagcctggccaatatggtgaaaccccatctctactaaaaatacaaaaattagccgggtgtggtggcgggtgcctgtaacccagctacttgggaggctgaggcaggagaattgcttgtacccagggggcacaggttgcagtgagctgagatcatgccactgcactccagcctgggtgacagagtgagactctttgactcacaaaaaaaaaaaaaaaaagaaatcaatgagaaacctgaagcctgactggctggaacagaaggaatccgtaagaaatgagtagaagaataaaataataatgttttttaaattagtattgttcttttaaattatttacatgtattaaatcattcatttacttttcctattttatgaaataagtcccactatcatgcccattttacagatgaggaaattgatgtaccaaaaggtttgagcaacttcctgcaggtcagagtgaccaagcaggccaggtgaggtggctcatgcctgtaatcccagcattttgggaggccaagatgggaggatcacttgaggcctggagttcaagaccggcctgggcaacataaaaagattcatctctataaaaacaacaagttttaaaatgtaatttagctgggtgtggtggtatgcacctgtagtcccagctacttggaaggttgaggcaggaggactgcttgagcccaggagtttgaggtaataaacacaataataatgtaatctggatctataattccaaataatttcatcatgggacatggtagagaaaagatagaaaggaaagtaaaaatatgctgagactcttgcctttttggcaaatagaatataaatgctggttaactgtagtctttgattaaaatatatattaaaatatacatattaaaaattcacacaggccaaactgggtctgatggctcatgcctgtaatccagacagtttgggaggccgaggcaggaggatcacttgagctcaggagtttaagaccagcctgggcaacatagagagaccttgtctctacaagaaataaaattaaaaatttagccaggcatggtagcaaacatctgtggtctcagctactcaggaggccaaggtgggaggattgcttgaacccaggaggtcgagactgcagttagcagtgatcatgccactgcactccagcttagatgacagggtgaggccttgtctcaagaaaaacaaaaaaaaaaaattcacaggccaggcatagtggctgacgcttgtaatcccatcactttgggaggctgaggccagaggatcacttgaggccaggagtttgagaccagccagggcagtatagtgagactgccgcccaaccgcccatctctatttttcaaaaagaaagaaagaaaaacagagtgactgagcagagattcaaaactcagtccaaacccactggtttccctgtgctcttaacaactgtatcatgctgtctatgggtgatgctccccagccagctagaaaacaccttcactataggtgaaaagtggtgctcactgcactgtgttcaggaaaagtgtgtcctggagaaacgcttcataaaggtggagctaccattaccccaatccccaaccccaggctacacacacacacacacacacacacacacacacacacacacacaaaacccatgtccacagtctgcatgggaacctccatccctaaatcctactaaaccaataactctttttttttttttgagacaaagtctcactcttgtcccccagtctggagtgcagtggcacgatctcggctcactgcgacctccgcctcccgggttcaagcgattctcctgtctcagcctcccgagtacctgggattacaggtgcgtaccaacacacccagctaattttttgtattttaagtagagatggggtttcaccatgttggccaggctggtctcgaactcctgacctcaggtgatccacccatctcggcctcccaaagtgctgggattacaggtgtgagccaccgtgcccggccaccaataactctttttaagacaagaaatattaaagtaaaaacaattcctctccctccacttcccttctcccaagactcttccttctgatagccatgttttcaggctcacccccagctctgccctattcagaaaccaaaggtcctcataaaagtatttgtaataatgtgtgaatgactcgtgagcttcaaataactgtctctgcagcaaatggccagcctccaaatagaagctagttcaagccagtttccttggctcatttcccaccgctatgtcagggatcaatttagaccatggcctccctcccattttctcttccctggcggtaccattcttctggtcctcccactcccatcccaaaactggtccactcagtcctctcctgttcagaggcagccttcatgacagtgtcggagaccctaagggttaaatatacagcagtggtttaaagttttacctgtatttactcatttgatccttaaaataaccctaagagacatgtattataatggtcctatttccagatgagaaatctgagatacagaaaggttatgtaatctgcccagggactcacagctagtaagtagtacagctggcattgacaccccgcactctctgaaccactatgccacacaggcatggatgagcaaccctcaccaagagtcaggttcgaagggaatacattctcttccaaccatgcaactgacttccttacttgttccattgccccagcctagagacgagattctctaactccgacctagcttctttcccaactctgactttttcttcttgctccacccatccttagctccgccacaatgtccctctctttccatcacttttttggtccttgataatatttccttcgtaagcagatttctccaaacctctaccctggggagcccattctggcattccacctcctaaacccatgttcctgcaaagtgtctctgttgtcctagccctccatgccacagccatgggtgcccttcgcctgtttcttgactcaagccaggcaggaggaggatctttatgaacaagatcccccaccccatatgtctgcatttaatttcagatcagttcctaggccaaagctctcttccaaactcgtcaagagaagttttaaatatattctcccagagcaaataattttgtgttttaacatgggacaaagctctagaaacatctctgggctggtgactctccacttgcctgtcgggagctagctttggcccttctcctgcagctcctgcaccagaaggctgacccacagggactccagggaccctcgcaccctctggctacagtgaaagacaatttggccactgaaagtcataggtaggagatgaaggttcatgaggaaagcgaggttggggtattttcaccagttccctcctagcaggctgcaggctgcaggctggggttgggagtagcagtggcttctttagagcagtcggccccctcctgctgcaggcctccctcccttttcccctctctgggcgtgcttccccatcctctaccctgctcaagcctctataaacagcccctccttcaaactccccactgccttcccaatcaagatccccctccaggcaccctcaatagtggagttcagacacagccactgaggacaagctctctgcaagccctggacaccaaagtattttggtgaccacttcctcctaaccaggccttggtcggtggctccttcacaaaatgacatctgagaagaaacagaaagccaaatgaggatgtgggtggccctgctcctccccggacacagacccatgcatcatgacaaggccacacatgcccagtcacaggatttgacacatgggacccctgggagaaggaggaaacacccacggcttacaaacccgcagcaaacccagagtcctcagcctaggaaaggggctggggacagggcctgacaccctgaagtgcaaggcctgccaaccttggagctgacgaggggaataatttttttaaagatccattactgtcaactgcccccgggaacacccttctttgcaccaactcccctgcctttcaatatgaagacaagtctgacgcctacgtggggaactcaaagtcacacttcctctggcagccgttggtcaaaccgctttataaatctgctaatgattttgtgttatcctgctagactgacactcgttggaaaaaaaagttacataactggaaatgattagaagataaggctttgagcatcatgcttggaaatttcactgctctgcccaattttgggctgagttttaacaaaccagcatttcctggctcctgacactgggaagccttgtaggtgtgagaatctgcttccagttaatagtagacactttggaaccaggtttgtcacatgaatatacccttggtcctcccgtcagtcaactggactcttcaccctccccgcaaaaaatttaaaagccacccttagacatatcacccttaggcatatcacccttagacacacacaatttcacacacatgtgaaacccagatggccagtaagcatataggtactcgtaggctggacatggtggtatccacctgcagtcccagctactctaggaggctgggatgggaggattgcttgagcccaggagattgaggttccagtgagctatgatcgtaccactgcgctccagcctaggcaacagaacaaaatcctgttattttattttatttttattttttgagacggagtctcgctctgtcacccaggctggagtgcagcggcacaatctcggctcactgcaagctctgcctcccaggttgatgccatcctcctgcctcagcctccctagtagctgggtctacaggcgtccgccaccacacctggctaatttttttgtatttttttagtagagacggggtttcaccgtgttagccaggatggtctcgatctcctgaccttgtgatccacccacctcggcctcccaaagcgctgggattacaggcgtgagccaccgcacccggccaatcctgttttttctttttttggtaaaaaaaaaaaaaaaaaaaaaaaacaaggccaggtgcagggggctcgcatctgtaatcccaacactttgggaggccgaggtaggagagtcacttgaggccaggagttcaagaccagcctgggtaacatagcaagatcccacctctataaaaagaaaaataaaaaaagatatgtgcattacactgtatgtaagttaatgctctgtatactgaactccttagaatgaagtatactgctgttctcaacttactttgaaatgtttccaaaaaaatacgattgatggaaggatagaaggttagatatgcaataaaacaagtataagaaaatgttaatggcggaatctgatgatgggtatataagtgtgcactgtaattcttgcaactcttcaaatttttcataataaaattctgaaaaattgctaattaaaaaggtaaagaggccaagcacagtggggcacacctgtaatctcagcaccttgggaggccaaggtgggaggatcatttgagctgaggagttcaagatcagcctgggcaacatggtgaaacctcatctcttctaaaaaatacaaaatattagctgggcatggtggcatgcacatgtagtcccagatactcgggaggctgaggtgagaggatcatcacctgagcccaggaagtggaggctgcagtgagccaagatcacaccactgcactccagcgtggacaacagagtgagacactgtctctaaaacatatatatatatatatatatatatatatatattaaagataacacacacgcacaatgtgagacccctacacgttcacccaaatgactaaaatctgtaaaaccagcaatggcacacacagacaaggatgtagaactatgagaagtcacagacagtgccagtgggagtggaacactatttggtagtatttcccaagagtaaacatatgatacacatattctatgacctagcaatcctacccctaggtgaatacccaacacaaatgagagctttcgtccaccaaaaacatgtacgagaatgttcaaggtagcactgttcataatagtatgaaagaacccaaagatccaagagtaggataaataattgatggtgtatttattcatagggtgacacactacacagcaatgagaatgaactactgccacccataatataggtgaatctcacaaacaaggtgttaagtgagaaaagccagatgcaccccccccaacctccatcaccaaaaagaataacttctctatgctcagtttatgtaaaatttaaaaccaagcaaaattattacacaatctagaagtcaagatcggggtcacctttggaagagagtactgacttggagagaaggtttcttaggtcctgggtaagttccgtgtctgacgtagatgctcattacaagagtgttcccagtttatgaaaacgcatcaaactatacacatgaagtgtgacctttttttttttttttttgagacagtgtctcactctgtcgcccaggctgaagtgcagtggcacgatcttggctccctgcaacctctgcctcccaggctcaagtgatcctcccacctcagtctcctgagtagctgggactacaggtgcatgccaccacacctagctaatttttttgtagagacagggtttccccatattgcccaggctggtcttgaactcctgagctcaagtaatccaaccacctcagcctcctgagtagctggcactacaggtgcgtgccaccacacctagctaatttcttgtagggacagggtttccccatattgcccaggctggtcttgaactcctgagctcaagcgatccacccacctcagcctcccaaggtgctgggattacaggcatgagcgaccctgtctggccaggtatgaccgttcttctgtatgtaggttacacttcaacttaaaaaatttacactaaaaattgtattaaaaaaaaaggtggatcttcaagcaattcgtagagatctagggggtatttttaattgtttctctttgattttgtccctatttctactgcccatttaaaacacagatattaaataaaacagttacaggaccatatagagctaaaagcgacttcgaagatcacctagtttaattcctctgttttacagatgttgagagctgaggctgagaaagcttaagagacttgcccaggttacctagccaggaagaagaaaggcacctagagcctgtgaatcccagctccctgtctagtggtctctccacggcataccaaacctctgtaatctcaccatgactgcctgggctcacccttgccaccaggcagatcacatcacaggtgcgcaatatgacattttcctctaactataatatagaaagttaaggaagtatgtgctttgcttgtcgtttatttcagggatgggtctcactatgttgcctaggctgaatagcagtggcttcacacaggcaaaatcataaaacactaaaacctcaaactcctggcctcaagcaatcctcctacctcagcctcccaagtagcgggaactgctggcatgagccaccacacctggtcataatatggctgtttttgacaggatgcagtaagttggaagccatagaaattgaaaccatacacacacacacacacacacacacacacacacacacacagacgaaggcatggcagtatttattggctcatataacttggaagttcaagagtgtctggccttcagttgcagatggatccaagcacttgaacaagggtcgcggctccgttttgtttgtttgtttgcggtttttgtttgttttttgctagcttcattctcaggtgcttcccaagtattaccaaagatggtcatggcagctccaagtttataatcttcctagctttaacaaccccaggggaagaaagcatttctttgccaaactatacagcaaaaggtcctagggagggaagaagctcatgaacccagcttgggtgacatgtccatttctggttcactgtagtgagagggatttaggagaggcctggttctaaccaaactcaaaccagctccaaccaatagttcactcattttccaatgaacccactgcatctgtggttccccaaagaaaaatggaagtgtcgttaccagaagaaggagaatcagagacaacagaccacaaatatccactacagtaggtgccatcttgtcctctgactcgagcactgtaacaggattttaccatgtcaacgggaaaggaaggtcgcagactttgaacttgagcttcctgcagactcacattcccacacatttcagctgactgctcaacagttaatcttgacagatctcagttgttccactcagtcattaactattacatttaaatcaaatatgccctccagcccaagccaaaaaacatacaatgatggatgatgaagccaaatgcaaatgtccagttgccaatctgccttacaaaaacgccttcccaggccgggtgcggtggctcatgcgtgtaatcccagcattttgggaggccgaggcgggcggatcatgaggtcaggagatcgagaccatcctggttaacgcggtgaaaccccgtctctactaaaaaacatacaaaaaattagccaggcgtggtggcgggcgcctgtatttccagctactcaggaggctgaggcaggagaatggcgtgaacccgggaggcggagcctgcagtgagccgagattgtgccactgcactccagcctgggcgacagagcaagactccatctcaaaaaaaaaaaaaaaaaaaaaatcgccttcccagaatgctggcagaacccttccgaaggctcccagtctgaaggtgctaatatcgcccaggcacatgctggtccctctgagataaactgaaagcagtgacttggcttgggattgtccctgctctgacagcccggcctgaagaagcagcgctgcccagtgtaagaatcacacagtctgtgctgagaagctgggcgggcttatttcagggggaaaaacatcacactgaatcctctctctctaggagggagctgtatattttatgaatggtgtgaaccactcctggatgttacttcctgaatttatttaaagaatttaatgtatccttcaagtttcctgggtcccccctcccactcattcttgacaagcactctgggggagcttgtatcttttgatttttttaaagaaggaaaaaaataccaagggattgccgaagtcccagtttgctccacgagtcactttttaaaagtttgatcttttcatgtcactggctatttactgtgttaagtttccagagatgtattaagtgagaaaaaacagccacatctgatcagtccatatttttctatgaatcaataacttgtcataaaagaagagcagaaattagttgcctattaaaaatgttcaaatgctaagctaaataagcccatcacacgaggggaagtatatgattccaattatatgaggtccctagtatagtcaaattcatagagatagaaaggacaatggagttaccaggggctggcggggagagggaatggggagtgactgtttactgggttcagagtttcagttttgcaaaatgaaaaaggctctggggctaaatcatggtgaaggctgtacaacaatgtgatgtgcttaatactgaactatagacttccaatggttaagatggtaaattttgttatatgtgatttatcatagtttaaaaaataaatgtaaaaaggacaacaaaaaaatattttagaaacaggccagacacgatggctcagaaaccctgtctctacaaagaaaaaaaaattatttttctttgtagagactgggtcttactctgtcacccaggctggactgcagtcgcgtgatctcggctcactgcaacctctgcctcccgggttcgagctattctcctgcctcagcctcctgaggagctgggattacaggcatgcgccaacacgcccgctaatttttgtatttttttagtagagacggggtgcgggggagtggtttcaccatgttggccaggctggttttggaactcctgacctccagtgatccgcttgcctcggcctcccaaagtgttgggattacaggcacgagccaccaggctgggccaaaaaatttttaatttaaaaaaaaaaaaaagaaagggaaacatagattggaataagatttaaagaaatcaaaatatctggctacaaaaatgcttgagagagaaatacagattaaagttgaaagaaataaaaaggcatctaacatattttaaattagtacctcctgaatattgtctgttctttatcactcctgcatcttacctcagctcttccacctgggttgggggatagggccatactttgagtgctgacaagctcttggttccaatccatccttggcattcccattctcccagcaagcccccaagactttccccatggggcggctttaccctgagggttagagctcatgttgagttacagagacctgggatacatacctctttctatctgggtgcccttaggtcagttactccagtcctcacctgtcaaatgaacaaattcaaagcactttgctcatggagtgaggattacattagagaacgcagataacgtgctcacttattagcacactgtctggtgcaaagaaaccgcttgggacatgacagctgtcattaacaatcccccaggctcccatgaggccccagctcagatttctcagtttctcacctttgactgccccttacagtcacctggggagcttcacctggtctgacgtcatcagtctggctgtggtctgggcctccctgccccgttaattttgcactgtgc[131 bp omitted]ccccatttctactaaaaatacaaaaattagcggggcttggtggtgcgcgcttgtagtcccagctactcaggaggctgaggcaggagaatcgcttgaacccgggaggcagaggttgcagtgagccgagttcacgccactgcactccagcctagcgacaaagtgagactctgtctcaaaaaaaaaaaaaaagaaatatggccatgactggactttctcttcagagaaaattgtcctagaaaaggtttaactagccaggtgtggtggtgtgaacctatagtccaagctactagggaggctgagcaggaggaggactgcttgagcctaggagttcaaggtggcagtgagccatgatcatacctgtgaatagccgctgcactccaatttgggcaacatagcaaaacctcatctctctttaaaaatgaaaaaaaaaagaaaagaaaaagaagccagacataatggctcacacctataatctcagcactttgggagactgaagcagaaggattgcttgagtccaggagttcaagacaagactgggcaacatggtgagatcctgtctctaaaaataataatgaaaaaaggaaaaaaaaaaaaaaaaaaggctgggcgcagtggctcacgcctgtaatcccagcactgtgggaggccaaggcaggcggatcacctgaggtcaggagttcgagaccagcctggccaacatggtgaaacctcgtctctactaaaaatacaaaaaattagctgggcgtggtggcgagcgcctgtagtcccagcactttgggaagctgaggcaggcggatcacaaggtcaggagatcgagatcatcctggctaacacagtgaaaccccgtctctactaaaaaatacaaaaaaaaaaaaaatagctgggtgtggt[132 bp omitted]tcaaaaaaaaaaaaaaaaaaaagaaaacaaaagaaaagtttaactcttcatgccctagagatgtaccatgatttcatcttgctgcttctcaaacagaaaaggagcctagcacatgtgctgctatgggagcttttgtttcaacttgactaaggagttcttgtggcaccagcttggtgccctcatcgatctctacctcctcttctttacttagcaatgccttttatgcatcaatttctacagattgctcattaggcaggcaagcttcgtccaatggttgaaaaacattggcttttgccaagagtgtctttaaaaagtcaagcctttcttttccctctggacattttaaaataaaactgcacccccaaagtaaatgtaagcagaggacccactgcttgcatttttacaccatacttacccctcctatatagaggctcccctactccagcctcccaccctgcagctcccaagggggcatgagacttgaggctcccctggaggaaagccagtggctctcaggatctggaaacgggacacttgtgtgcactgattcagacatcctttcaccttgccccatccaaaggcaacacccagagggtcccacccaggcctcaggatgcctccctattacacaggaaggtcattctgtccttggtcggcctcgcagaggtctcagagcaaaaggcaccaggaacccaggactcctggctttctttttctttttcttttttttttttttctttttcttttgttagagacaaggtctcactctgtcatccaggctgaagggcagtggggcaatcctagctcactgcagcctcaagctcctgagcttcaagagatcctcctgcctcagcctcccaagtggctgggactacaggcacacatcaccatgcccagctaattttttaatttttagtagagacagggtctcactacgttgcccaggctggtctcgaactcctggcctaagcaatcctaccacttcagcctcccaaagtggtgagattgcaggcgtgagtcaccacaccaggtgactttccacaccagctcctttccaggggatgggggccccaagggacctccttcaactcactcccaaggagaactccaatttgataaacaggcatcagagtttgcaaataccaagttaggaaaatatccttcactttctctagttttcttcctttagcttttcaatgaaatatgtattgatgctttccttttataatgtattacattcttctgaccacagaaaatccaaacaagaaactaaaccatcattaacctctcaatgaatcttcctccagactttcttttatgtgcacacacacattttgtcgttgttggttttacaaatttggaattttgttatacatggtattttgcagcctttacttactatgaactaattttttaagtaaaaattttccctattctgcttagtcagtgaaaatacaagatgataaaaacaatttcaagcactcttgtgtttgcaaaataaggaactcataactgatttaaaaagaccagcatattgataaagccaggacctacgtttccatgagctaggccttgggacagcccccgcaggcacattcgatcaaaggctccagagatccccaaaagtctatcacttgtcctttcacgagctgatgggtggagaccctgctctgggacttcactctgccactacctgccatgtggccttct[135 bp omitted]gcaacctccaccgcctgggttcaagcgatcctcctgcctcagcctcccgagtagctgggattacaggcatgcaccaccacgcccggctaattttgtgtttttagtagagacagggtttctccatgttggtcaggctgttctcgaactcctgacctcaggtgatccatccgcctcccagagtgctgggattacaggcatgagccaccacgcccagcctccgcttgtctatttctaacttgtttaaagttatatctgtaaacttcggttttctcatagctagagtaggacatgaaaaaaatataaacctcacgtgggtgtcaaaaagattaaggagagaatgggctgggctgtaagggccggttactgagcctggggtgagatggtggcttggctcatatccccttcgtaagatttcaacctgtttagagggcattggccctataaccaagcatgtcatcttcttctgccacctttgagaagagtcatcgaacacaggcacttgtgcaaacattgcgaaggtcttttttttctttttttttctgtgtctttttttagagacagggtctcaatatgttttgttttgagacaaggtctcgctctgtcacccaggctggagtgcagcggcacaatcacagcccacaggagccgacaccttctgggctcaggtgatcctcccacctgggcctcccgagtagctgggactacaggcatgcaccaccatgcctggctgacatttgtattttttgtagagacgggattttgtcatgttgcgcaggctggtcttgaactcctgggctcaagccacctgcccacctcagcctcccagagtgctgggattacaggtgtgagcctctgcacctggcctctcactacatcatgttgcccaggttgatggactctaacttctgggctcaaggtactcccacctctcagcttccaagcagctgggattacaggctcaattctttgccatggtacttttaatagcaaaaagaaaaaattagaagcactttaaatatccatcaactaaggaacggaaaataaagtatgctacatccatactatagaataccacacagtttttataaataaccactgatgtatatgtgctaacaaaaaaaaataacttcaagatacattatcaagtgagaaaaaaaagaagttaagaaataatagcttggttttctttatttaaaagaactaaacccacaaatcatcagagtatctttccacagaggcctagggaagtagttgaaggtggctttagaataattctgggtttttcaaccttttttcattactgccctctctaaggagccttttaagatatttctttcctaatcactcccccactaccatgaaattttaataccacagtcaggctgtatgtctgtttacgtactgtggaccgctggagagccacaaaccgctgtaggccctaggatgttgttagcacctcagaacccatttcttccccctgcagggtgatattgcccctagtgaggatgtatggtctaatttgtatattaattgtgtggttaaaaaattaataattaggctgggcacggtggctcatgcctgtaatcccagcactttgggaggctgaggcgggcggatcacaaggtcaggagtttgagaccagcctggccaacatggtgaaacaccatctctactaaaaatacaaaattagccaggcatggtggcatgcacctgtaatcccagctacttgggaggctgagacaggagaatcacttgaacatgggaggcagagcttgcagtgagccgagatcacgccactgcactccagcgtgggcgacagagtgagactccatctcaaaaaaaaaaaaaaaattagtaattaggccaggtgcagtggctcacgcctgtaatccagcactttgggaggccgaggcaggcagatcacaatgtcaggagtttgagatcagcctggccaacatggtgaaaccctgtctctactaaaaatacaaaatagccaggcatggtggcgcgcacctgtaatccccgctactctgaagcaggagaatcacttgaacccaggaggcagaagttgcagtgagccaagatcatgtcattgcactccagcctgggcaacaagagcaagacttcgactcaaaaaaaaaaattaattaataattttaaaagttcacatttacactcagcacaatgtaaaaccttgtagacagtacctccttccctaaaacttcttgtgggttaagcctgccagtgaagtctgggtggggttacggacaggcaaacacagccatgctacagtttatgctgtttgtaatgaaacagatgctaacaacaccaggaagggtgcgtcatccctgaggctttgaccatatctcagatggtccctgatggttttccattccttgagagctgcagataaggtcaatgtcccgatgactccatggctgccttcactgaacccagggagaactgtctggtttcctggttttccgcccactctttggttgctccttctcctttacagttggcttgctctgcccagtcctcttaatttggggtgcctccaggccccatccccagacctcttctccatccaccccactccttaggtgatctcatccagtacagcggcttgaagactatctacgccataacgacttcaaatttatacctaccttgaattaagagtcctctttccaaatgcctactcactatcattacttgaacatatataggaatctcaaacttaactcttgatttcctccccaaacctgctgcttccgttcctcaccttctcatttcaaaccagctccttcctcccatttgcttatgccaaaaaccttgaaactcgctttgagttctctctcaaaccttatacgtgcaacccattaccaaatcccattggtctcgctctcaaaatacatccaaaatccagtggtgacagccatgtcacagccagcatcagctcttgcttatattactgcaataaccaccttacttgtctccctccttctaccctctgctcccccctccatccccccatcattcattcccaagagagcagcagagtgatccttgtaaacatccagctggctcaagtcactcctctgctcaatggctcccctgacactcagggtaaatgtcagatccttgtgagggtctcaaaagccctcgtgctttggccccacccacccctcagtctggtcacctctctgtccccatctccaacactccccacaccacacacactcactctgccccagccacactgacctccttgctgttccctgaccactccaggaatgctctggcctcagggcctttgcacatgctgttctgttttctggctggaatgctcttctctcagcaatccacgtgcttactccatcgtatcttccagggctttgcacagatgccctctcctaatgagaccttctctgcccatcccatttaaaatgacacattttctagatcaccatgcagtttgcttagttttccttgctatctgtcacccctaactaaaatgtaaactctataaagtcaggatgtctgtggttttactactactacatctcctactttccaggttgtgccctgcacacggctggcactgaacgagcgtttgttcagtgaatgagccccgtatcttgttaatctgctgaaaggttccaatgagaaagaaagtggccttttaaacttacatcttctgcccagcagctctgtcacctcggaggtggtctctgagcttagaagtatccctctgccacacataaataccatcacagatccctgaacaactcaaaggccagctggcactttctgtggctgagccagcgaaccactgggatcaattgtcttctaagctcagcaatttgcctaagtcccagccaagggcaaaagtcctcctaactcccaggcaccatttctctctctgtagcttcacttgagccgcaaagaatccaggatccctcaagctctgagttccattcatggaaaatcctaaaacttccttcatcccttcagtcagaatcttttcctcttttggtttggaagaaacccagaggtgttaaaactgaacatcttgaccgaatttcctccgggcaagctttccccaagctcgcttactccaacacaccagcccctcctgccagacccagtcagagccagacttttgagtaacttggtccaagcagggctctgacagcgaacccagaaccccattcacagctggctccctgcctgtcaccaagaatagctccttaaatcaggtcttcgggtaacaaatgaggaacacatcaatttagcaggaaatcggcttcccttgaagcgtctctgaagtttgttgagacaaaaggaatctacagtgcttgagtaataggaaagaccacctgcaacttttacagaacttcttttggacttgaaaattctaagacgctagggggaagaaatctcgaaaatgaacaagatccaaatgcataaggattcatttcccatctccctaaataatcacagccacatgcttcttatctgccataaaaaccaggcagtccgtgtaagggacgggtgaagcagtgaagaacgctggtcctaagcagtgttgaaacctctgattggttgtgtgtcctgagcaaattctttgacctctctgagcctttatctgagaaatggaatccacctcgccaggctgttgataagattacatgagaaatcctgcatgaaagccctctgtaaccgctataggactaaacaagtgacgtttcaacacacacaggaaatgccacttaagttcagaactctctgaggggcaccaggagcaagcacaaaaataaaagactgtcatcacttttgtcttcaagaagcttcaagttcagctgggaaaacagcacacacaggacagcggatgatctagcattcgcaaaagcaacatactaagaaaagcatacacctccatctgctgctttcccctaagtgtccctcgggtctgcttgtttggattctaatatctgcctaactacccatcaatctggctacttcctggactgcaaaagacctcaaagctatgtgtaaaagaagtctctaaatctaagccagataggatggcctgccatggcagccctcattccactcctcaggtccagtcctggttgacttcacctcatcacccaccagccagtgcagctaacctccttcctctgccgcatgtccggccctgcccaaggattccccagggggcagccaatcatcttgttcacctccagcacagcactgtgcataacactctgtattgctctcaactttgcccccaggccagctgaaagcagaggaaagaagaaaggaaaacagaattcaaatggagcaattagcaaaaggagaaatgaggaagcagattaaaaaaaaagaagaagaaaaaaaaagaaacagaaagggagacaatcaaagaaaaaatgaggaacatacagaactatcacttgacatctgactttatagcttaggaagggcttaacctcacattctgtggcttgcgcctcttacaacattctgcagggctgagtaagcaaggcagggaattttacacccatttaggaaatgagcaaactaaggcttgacagactttaatgaagcgctttgtagccagagcccctcactgcctaccttcttatttctcaagtgccttttccattgccagtaacccatgcagtctcaacaaaagactaaagattcagcatctggaggcagaactgaagaccagaaaaagaagtggatggtgttattcacaacagccaaaacatgggaactagccaagtgtccatcaactgatggatggataaacaaatgtggtatatccatgcaatggagtattattcagtcatgaaaagcaatgaagtactgatacacgtcactacgcaaatgaaccctgaagacatcatgtcaacggaaataaaccaaatacgaagtccacccattctgattccatttctgtgaaacacctagaataggcagatgcatagaaccagaaaacagatgagtggtcgcctgatgctgggggcgggcgaagggaggagaatggggagtggctgcttaatgagtatgggttactttcgggatgatgaaacttctggaactggataatggtggtggctgtataacactgtgaatgtaccaaatgccactgaacattaaaatggtgaatttcatgttatgtgaattttaacacaactttttttaaaagtagaaggggaggcggggaagagggagagaaaaaaaatgaagagaaggaggaatgattcctaggtaagtaatgagtttcccgaaatcagggacccgaggagctctgaggtataaaaagagaccctctctcggccaggcgcggtggctcacgcctataattccagcactttggtaggca[134 bp omitted]gaggcaagagaatggcgtgaatgcgggagggggagcttgtagtgagccgagatcgtgccactgcactgcagcctgggggacagagctagactccgtctcaaaaaaaaaagaaaaaaaaagagaccctctctccttttatactgaggaggtaacataatgctgggtttgcccttcatgggggtgggaggtggctgcagacccaaagaaccagcagcagcagcctggaaagggaacagagccatgagcacagggagacggtggagggatgaagctgacatcttcacaggaaaaccagctgatctctccctgaagatctccttggtgtgtactcacctgtcctttatactggctgaactgttcattcccacatatgaataagtgaataacatgagtaagtgcccaaccctgggccaggcactgtcataggcgtttcaggacactaatgatggaatccctggcctcattaagcaaaccctctggagggtgacaacgttcaaactcataggctgctaggacttagtgtaatatagtctgtggctcaattcacccagtgtaaacaaaagctaataaaggaatctttcttctctgatttttaacacatgttaatcacatttggggactgagtagagattagagggatataggggatgcagtctgtagaacaaacagcaactcaccttgcagggtgagcactaaacagagacctggatgcagaaaaccagctattttaattaaaaattctggccaggcgcggtggctcacatctataatcccagcactctgggaggc[135 bp omitted]gaggcaggagaatggcgtgaacccaggaggcggagcttgcagtgagctgagatcgcaccactgcactccagcctgggcggcagagcgagactccgtatcaaaaaaaataattaaaaaaaataaaaaacaattctggattgaagcccagagtgaggaatttgacttcaggccccaggttcagacagaattcttccaaaagacacgtgccagtgccttcacgggctttgacctgatgcagctctgccctcatgcagctcacattcctttctctgagacagggtctcactctgtcacccaggctggagtgcagtggcacaatcacagctcactgcagcctcggcctcctggactcaagcgatactcccacattagacttccgagtagctgggaccacacgtgcatgccaccacgcctggctaattttttattttctatagagatgggggtctcactatgttgcccaggctggtctcgaaatcctgggctcaagtgatgctcctgcctcggcctcccaaagtgttgggattatgggcacgagccaccacgcgcggcctggagttcacattctaatgataataaggtaaagaagtgaactatataacccttcagctaggaatacatgttagtaagaaaaatgggacaagcaaactgtccctaggtccctatgttttttcaaggttttgatcccatgtggaactatgtaaataagttgcctacccaagcccagggtaaggggcttgtgtgagtttgctggggctgccacaaaaaagaatcatagactgggtggcttaaaccactgaaatttatttcctcacagttctagaagctgggaatccaagctcaaggttgcttgtaaggcttctccccactggcttacaaacagccgtcttctccctatgtcttcacacggttttccctctgtgtgtatctgtgtcctcatttccctttcttaaaaggacaccagtcatacaggatgagggcccaccctaatgaccgcattttatttagttagttagttagttagttagttattttccttgacctacaacagtgtggtcaaaaattctttttctttttatttgtactttgtagagccaaggtctcaccatgttgcccaggcttgtcttcaactcctggccttaagtgatcctcctgtcttggcctcccaaagggttaggattacaggcatgagctactacagctggccatgcattttaacttacctctttaaagactctttctccacatgcagtcacattctgaggtactaggggttgggacttcaaatacgagtggggagtgggtccaaactcagcccatggtattcttgagcactcccacagccctgactgtcccctggggcccctcactgtgctgggcacatccccgttatcactcggtctggttccccacggacaatgaaccctctgatcctagggacccctgagtcctgtccactccatctcattctcggctatatcccagggttgagaacacacctcgagccttagaggggcttaactgaaggcagggaaggatgaaggaggcaacagagctcttactgcaaatgattaaagcttgtctgggccaagaattccaacagctttcctaatcggatagcagggacagggaggaggtcttaggaggaggcctcagaagcaacttcaaagaggccagaggagaaaggatgaccacagcagagaggtgaggggttagaccaagccacctggttgagtcgggacagctgggtgcaagagctggggagagactcccccactctcctccctgcacagcgtctcttagcaccgcttgcattcatcacccgtaaacttcaaatcccgtacacagccaccatcaccttcaaaatccttccagtcatcctcaaaatccttctagtcaccctgaatgggcagcagaatgggtgtcaccacccttttgacagctgaaaaaactgaaggtcagagatcttacatgaacattgcaaggccaaagagccaataactctgtggaaggggtgttggaaggtaccgtagttaaaacccagggccctcagctacacccagctgtccctgcagcagccctactgagaaggagatgaggagagaggaccactccaagcatccagctgcctttcacttgccaatcctgggagtcctggcctggggctcaatggccttgttctccaggagccagtggccttcccttaatagtcagcactccaagatgacctggctatactccttctaaccttggccgtccgtgaccccaagctggttaagccgtgagccaaaatcagacaagatgtccccagttcttaaggcaagctctccctttatcctctttgattcacccatccagtcatcaaatacttactgagccagacttcagagacaccaagcaccatgccagaccagagtagttacaaaagtttaggaagtggcgttcctggccctgcagagctcagagtgtaatggaggaaacagtcaaataaataaggcatcgcagtcccatgtggttggtgccatcccagcaggagatccccatgcaagccagcagaagaaaggactctgcctgggggagagcaaaggccacacagaggaaggggtccatgggctggatcttgataaaagatcatcattccctcgacagggatgagaagggcctctagacagaagctgcagccgagcaaaggcacagaggtgtcaggttgcttcccgctccccaggagagggaaagtaaggaggctggagaaggagtgaggccaggtgcagtttgtacagggtccatatttgtgcaaggtccagatgaggagtgtcttgacacttcaagcaatggggagccagtggagatcaggtgtggagaggatgctgctgacgccatgtgtggggtccctggctcggtggaaacccaagagatatttactaaggaccaggttaatggagactgtgtctgctcctatggaggtgttaccttctcactgctgccctccagccttctcagatggagtatagcctctaagcatgactgctgctcttctccccagaccacaagccatagaaagccaagtacaggtgactgcatgattatcaatcatgtcagctgcctgtctgcaccgtaaccctttccaacttggctgcatctcacatcagtcctcatttgcaagagacttgcagctgtagctgaatatatatatagtcttgatgatttgcagtgaagcataatttacaccttctactgcttctcagagaaatcatttccccaagactaataataaagcagaccagccacccagagtaacaaagccccccaactacctcaacacgcaattcagaaacaaaccagaacaccggccgcattaggtcagcactggcgccattaggcacctccgagagcaaagctgacaggcagggaaggaatgtcagcatttagcatcacataacactgggttttcaaactgggtcctacagagccggagggattcctggagggagtgatccagagcctgagtcacagtcccctgggagtgtatgtggcagaatgagcagctgctttatccaggcccctgaagcaagcaccagggctgggagatgggggattccaggcaagctcagctcccctgcctctcccattcagcaatgccaagaagtatcgctggcttcttggaccaggacgaagggcttaggccagagatggttctgtggtgcccgtggaatgcttggcaatgccttggcaagtccataccaacatctcccaaactcgccgcccccacccccacactctctgaatgactccacatagaggactctgcatagatgaggaaggagtctggcttcatgtccactccggctattttctcccaggtgaggcagaagaagcccatctgaaattctaaaccctatcaggatctgacagccacgcccaccacagggctccagaaaaccatacacggagcctgtctcatacctctcctgtgaacatccctaaaccccagctcactgtctctcccagcacacattctaatcagcatgcattagtaatctggctagagggacaggcaaatctttgaaagagcttcaccaccaactcaactcccctccctcccccaccacctttttttttttttttttttttttttttttttgctgatgagcaaaaattgcctcctcttttcaaagcaagaagtcatcagaaacaggaagatctctgccctcttccctgtgtgggctgtcacggcagacagcggagggcttttctttgttcgctggttaacagagggaattagagaaaaaaggtgagcagagagagccctacaaccaccaccttggaggatccgattatacggccaggacagacaggtgctggggcacagaaagagctcaaaaactgtagtcgactggctgagagaaccaatgtcccctctgccatgtcacaagacacatcaacttgaaaacatctggccaggcacggtggctcatgcctgtaatcccagcagtttgcaaggctgaggtgggcggatcacctgaggtcgggagttcgagaccagcctgaccaacatggagaaactcggtctctactaaaaatacaaaattagccgggcgtggtggtgcatgcctgtaatcccaactactctggaggctgaggcaggagaatcgcttgaagctgggaggcggatgttgcagtgagccgagatcgatcgttccattgcactccagcctgggcaacatgagtgaaactccatctcaaaaaaaaaaaaattcataggtcctgtgacaccaaatgagaggagagtattttcccttataccaagcagggagatatttcaggagatcttggatgcaatctgttgcagaaaactccgtgtttccaagctggtttatctgtcaccttatctaagattcccctccccttcaatccccttaacctcttaagattcttggtcacattttatcacatgcagggaggatctggataggaggagactgagactatgaacatgaatttttggtttaagtttgtggtccaaatacactataacaaactcagagatccacagaagggctgtgacttccttgggcaaaaatgtcttcaatgacagtgctaaaaccagacaaacagggacctgatggtgctaaaaccagacaaacagaaccaagattgaaactgacttaaggtgacagtggccaggggtcagaaagacaaggtccccacccaaaatggtgaccaggaggttgggaaggacgctccgagacagcaggtttcttttattaataaagaaggcaaatagtaatgaccagcattctgagcaatggatgcaaaatacgtaatatggcagtgaccatcagcaaatactgagaactggtgtcaagctctcagtggagcatttacgtttaggaaaacaattgtaactttcacaacaatcctctgatgtgggccttattattcccacttaaagatacggaaactaatggctgggcgtggtggctcatggctgttatcccagcactctgggaggccaaggcaggtggatcacctgaggtcaggagttcgagaccagactggccaacgtgaggaaaccccatctctattaaaaatacaaaaattagccaggcatggtagtgggtgcctgtaatcccagctacttgggaggctgagacaggagaatcgcttgaacccgagaggcggaggttgcagtgagccaagaccactccagcctggagggacagagcaaaactctgcctcaaaaaaaaaaaaaaaaagctatggaaactgaggtagaagttaaggtaaataatatgcctaaagtctcatacagccagcatgcaaacccaggtctgatcagctctaaacaccacgctcatcaccattgcaccaaactgcctgccaagatgcccacaaatcgagaacacccccatccaaggagtcacccaataatcaaatcaatcccaagggaggccgatttcttcaacgcctgtttttctctccagcacgaaataataatggtttgctgccctatatatacaatgacttcatggaatctgagttatttgccctgcagcagggatgttctatttgagtcacacacactctgttccccaatcaatcttgttacctatcctatgcatgtgtaagatgcctgcatgggatttttattgttttgtatttattttattgtaactccttattgttacttttttccccatgtgaagccaagtaactaccatgggcagcaaactcagaatctggtattcatcggcaccatgaatgtcagcatgagggaactataaccctttgttttcttatcaagtccctaagcctggttgtacaaggacgctaaaggcttaaaagatcagagacccaatccttgagctcaaggattccacaatgtagtgggtggcaacaaaattccaacccagtagggtaagtgttaaggggtctagaataaggat[186 bp omitted]tggtgcatgcctgtaatcccagctactcgggaggctgaggcaggggaatcgcttgaacccaggaggtggagattgcagtgagctgagattgagccactgcactccagcctgggtgacagagcaagactccacctcaaaaaaaaaaagaatagaatagaatggggatatatctcaatagagctgtcaaacagaaagaaaagggagtaagggtaaagaagaggatgggggaggagggttacttcgaggaacaggaacagcatgcacagggtacagaagcaaaaaaaagcaaagctgtacccaagaatcaggtagttccatgtggttctgataacatcatgcacgtgaataaatagctaaaatgcagctcaggagatagacaggggttgggtcatgaagggcttgtaaacaaggctaaggcatggtatattgtaaaggcaatgaagaacctatgaaaaatgttaaacagcagagttccgtgatcaaactggctacaaaaatcactgcaccatcactctggaggatatgagataggaatttggcaggacttgttttacaagatacaggtcacaaagaccccgttgatcaaacaggatccagtaaaggagccggccaaaacccaccaaaaccaagatggcagccagaggctaccgctggtcatcctcactgctcattatagggtaattataacacattggcatgctaaatgacactcccaccagcgccaggacagtttacaaatgccatggcaatgactggaagttaccctatatggtctgaaaggggaaggaaccctcagttcccagagctccctacccctttcccagaaatctcatgaataatctcccccttgtttagcatataatcaagaaataacagtaagtatagtcagtcaagcagcccatactgctacctaagcggtagccatccttttattcccttacttttggtgtgtgtgacggagtttcacttttgtcacccaggctggagtgcaatggcacgatctcgactcactgcaacctccacctcctgggttcaagcgattctcctgcctcagcctcccgagtagctgggattacaggcgcccaccaccacgctcggctaatttttgcatatttagtagagatggggtttcaccatgttggccaggctgatcttgaactcctgacctcaggtgatccacacacctcggcctcccaaactgctgggattacaggcatgaggcaccgcacccggccttattcccttactttttaataaatttgcttttactttgtcagctaactcttgaattatttcctgtgtgaagccaagaacccatgtggcctcccaggctcagccccaattttggggttcaccctgtgacagatggacatcactagggggataaaatggacagccactcctgttagggcacacggcagaaatccagactaagtctccgacagcaaggacctgagagttccatctaggggctgcaggagacaccggctttgtggtaccgccaccatctgcagtgtacagccctacaacacgggcccaggattagattctgagctccacagcaacactttaaaaagagattttccatccagccccttgaaacaaacctttcctttgccccagcaacaggcaaaaagacaaaaacgaatgcttgagtccttcagcagtctcctgagtttcacctctcccaataaatagccttttcctcattacaaaaagagttttgtgtgggagtgcccaggcagccggaggcccatcaaacccaggtaagaagccattaagactaattagcccagcctgaggagcagcaaccattatgtagcagtttcaaataaactagcaatggccagacgctgcagcttcccttgctttcacttgtaggacctacgccccgaaaaccctcaggaaaatgctataccatcttgtatgcaactccccaagtgttatcccaataccagcaacatcccatgggaatatgctggagatgcagaatctcaggccccaccccagacctactgaatccaaatctgcatttcataagactcacaagtgatttgtgcctcatcgataatgctgcaccagacagtcttgcagtacgacctcagagaggcccttggaaaagggtccccctacttccccaacaccatccgccctgtgtgccccaatgaaactccagttaacaggcagctgtcagcatccaactatgatcaccagagcatacaggaaggtaaactgcacttacagagtgtgtgtgtacaaagtgccaaagctcttctaccaggctctcctga[187 bp omitted]gtggtggcgggtgcctgtagtcccagctacttgggaggctgagg[139 bp omitted]caggtagcaggggctgagctgggatttgtacgcagacctgccaccctcttgccaagcactctgctgcccccacctcccaggggtttctggccgacccttgaacgttgttgtctaagctgtccatactgggagcagctgcagggctcacattccagttcacaaaccaaaccacacaaaacaaccagttatccccttggaactgataaactgtctcaagatgtagagaccatgtccccgttgcatatgtttttcctgacactgttggcatctggcaagaccatccctggctgcctctccatcgtcctggttcatactgcagtccagaccctgccccccagcctttccagcggctgaatcctgcacttcctccttagccaggctcctggcattggccccaggaaagcctccctgaggcccacctccacctcatgatcaaggaaactcctctggtcaaacaggaacaccagccaccatatctctgtcctcggattaaatatactcacagaggtctaattccaaaacctgtgttctttccatgaccctgggtagcctcatataatccacttttaaagagaaagaatgaaagtaaactaaatccaatctaattccaggatttaacaagtcttgcagacaaactgaaaacccctaagggtattcaaatgccttgctactcaaattgtggccggcagactggaagcagtggcatcacctgggagctggcgggaaatgcagaatcccagtgtggtgtaatatgaaatatatttggtccttgtccccaggtcctgccacatagctcctcaaacccttggaatttcctgataggaatgttgtttgttattcataatgagcccatttgatcacacttcagtggatgctaataaggtgacttagggtgggggccctcagatagcccaggttggagctggtcaccaggaacaagttattagaggattagagggttgggatttttgagccccacctgctgacctccaggaaaaggggggccatgggaggctggagaccaagctctataaaaactctttttttttttttttttgagacggagtgttgctgtgtctcactcaggctggagtgcagtggtgtgatctaggctcactgcaacctccacctcccaggttcaagcaactctcctgtctcagcctcctgagtagctgagactacggcgcgtgccaccacaccaggctcatttgtgtatttttagtagagacggggttttgtatgttggccaggctgttcttgaactcctgacctcaggtgatctaccttcctcggcctcccaaagtgctgagattacaggcatgagccaccctgcccagcctataaaaactcttgaacaagatttgataagcttctgggttgctgaacacatggaggtgctaggagagtccagagagggcatggaagctgcacacccctacccccatatgccctggcattgaacaggcagcccccagcattcaactatgatcactagagcatgcagaaatatgaattccacttatggagtgtgtacaaggtgccaagctcttctcccagcttctcctggccctcagagcaatcctgggaaacttagaaaaattcttcaacttgcagaatgcaccccttcctctggctgttcatctgtatcctttatagtaaaccagtaaacgtgtttccccaagttctgtgagccatcctaggaaattaatcaaacccaagcagggagcagtgggaaacccaatttacagccggtcaatcagaaatataagtgacactacttgacatatgaagtggggcactcttgtgggactgcgctctcagcctgtaggatctgactccaacaccaggtagacaatgtcacaacccaatagaaatataagaggttcagctggtgtccactgaagaacccgcctggtgtgtgggaaaacactcgccacccccaatcaagtcacagaagtgtctggtgctgtgtgagtgtggagaaacaggatggagtgtgagcagagagtttggttttttctttcagattcaggtttccacttcagactactaaatcagtctgcatttttttttttttttttttttttggagacggagtctcgctctgacacccaggctggagtgcagtggcgcattctcggctcactgcaagctccgcctcctggttcacgccattctcctgcctcagcctccagagtagctgggaccacaggtgcccaccatgcccagctaattttttgtatttttttttttaatagagacggggtttcactgcgttagccaggatggtctcgatctcctgatcttgtgatccgcctgcctcggcctcccaaagtgctggcattccaggtgtgagctaccgcgcgtggccagagtctgcattttaacaagagcctcgagtgatatgcacacccattcatgttggagaagcacagatctcacaccatgtatagtgatattgtacagctaggctctgatgtccctacaccagaagccaggccccacgtattcaaaggcttttttttttttttttgagacctagtctcactctgttgcctaggctggagtgcagtggtgcgatctcggtggctcactgtaacctccacctcctgggttcaacgaattctcctccctcagcctcctgagtagctgggattataggcatgtgccaccaagccaggccaatttttttgtatttttagtagggactgggtttcaccaca[138 bp omitted]gtacagtggctcatgcctatactcccaacactttgagaggcagaggcaggaggatcacttgaacccgggaggcagaggttgcagtgagccaggacagtgccactgcactccagcccgagcgacagaacaagattctgtctccaaaaaaaaacagaaaccactttgctgtagcagcactgaattcagtctgagaagcactgctctaggtgcgatgataaaatgctgaaactgaaacagacaggaactggggtgtccccatgagtggttacccatgtggtggtcaacagggccatctacatagatacagcttgctccttttctccttccaaacacacggcaggattgtattttttcactgtcttaaagttaggtgtggctgtgctttagacaataaaataccagcagaagtgtcatgtgtcattcctgggcaaaagctttaagaaccatgtgctgtttgacacagtccctgagcattccacacactgggcgttccatcatcctgggtcctggaggtcttgcggctttggaccaactcacaatagacttacaacatgagcaaaaagcaaatccatgttgctttaccactgagattgctgtggtggcataaagtaacccatcctgacccatatagcacacacccccacaatgctacctttttcagaatatttctgttactcctcattcactgctcaaattcatcattactttaaggtaggacctcttttttagccctgaacggcattacttaactcagttactcgctttgctcatcaaacttcactccggaatcatctgagtttttcttttccacagatttcctcatgtgtttatgcttttatctttttgtaccgtatgctttttggtaagctgccttaaatcctatttgccacaaggtgacagacagacagtcacatgaacagacacaccagacttggctttgaatgaattttggctgtttccaaaaaaaatcaaatccacccctcaaaagacaaagatttgctgttactgaggatatttataagaatgcagtcccgggccagcatgtattccttctacctattcttcccacaaaaggatacttacagaatgtttggtacacacagttcccacttttgaaaagtaattcttttctggacacaccatctctttttgcctcactgtgaggagaaatgtgaactatgctagctccacaaagacatttagcatcattaaccaatatttttattttttaaattcagtttcatcccagcactttgggaggccgaggcaggtggatcatttgaggtcaggagttcgagacctgcctggccaacatggtgaaacccatctccactaaaaatggaaaaattagccaggcatggtggtgggcacctgtaatcccagctactcgggaggcggaggcaggggaattacttgcacccaggagacagaggctgcagtgagccgagatcgcgccactgcactccagcctgggtgacagagcaagactccacctcaagaaaaaaaaaaaatccatttcaatatagttactgaaccccttccgcatgttctgacctgctaagcgcaggtaaacctgattttaactagttccttctggtgtacattgaggttgttgttcatcttgtgctatcagaggctgtgatgtaatatacgctgatatttacagcttgcctgatatatcagatgctccctgagaagaaatttctagaagtggaattgtacagtgccaaatggtccttcaggaagctcaggaccatttccttacaccctgccaataccattttttttttacatatttctgtcttcaagctgttttttaattaaatttgcaattattcaatcactggcgagactaaatagttgaggactttttatatggttttgtgtgtgtgtgtgttcatttgttttaagagacagagtctcacgctttcactcaggctagagtgcagtggtgcagtcttggctcactgcagctttgacctcccgggttcaagcgatcctcccacctgagcctcctgagtagctggggctacaggcatgaaccatcacacccagctaatttttttgtatttatagagaaaaaatttgggtttccccatgttgcccaggctggtcttgaactcctgggctcaaacaatctgcccaccttaacctcccaaagtgctgggattataggcatgagccaccatgcccagcctgtatatgttttattatgaagtgtctatccaagttccttgcccattcttatactgatatgttcctctttgttttgggttttgttgttttaatttataaaagcactttctacattaaggaactttttccaaatttgtatttgccttttacctccttttttttgggaagagatttctagtggcagaataaaggatggacagatggggaaaatacaaaagggaaaaagtgcattacaagtgacctgcaagaagtgagaccccctgaggttcccttactccctccgatcaacacaccagcaagacctgttgacactagctgcaacatacattccaaatccacacacctctcaccatctccacttccaccaccctgctctgagcttcccaactggtctccttgcctcccctccctgttttcttcaaatccattctccaccctgcagtctagaagagctttccagaacgcatccgaagatgccacccacttcaatcaaaccaaaggcttttccactgcatttagaaaatgacccatctccccaggttctatctccttccccggcacacccccaacccctctccccctacttgccactctaaccattctggaatattctggctctcccaggtttatcaaacacactcctctactcagggttatgtacatctgcagtccccctcagcctcaaattattttcccccaaatagtcacatggctggctgggcacagtggctcaagcctgtaatcccagcactttgggaggccaaggagggtggatcacttgaggccaggagttggagaccagcctggccaacatggcaaaaccctatctctactaaaaatacaaaaattagccggctgtggtggcgggtgcctatagtcccaactacttgggaagctgaggcatgaaaatcatttgaacccaggaggtagaggctgcagtgagccgagatcacaccactgcacttcagcctgggcaacagagcaagattccatctcccaaaaaaaaaaaaaagttgaaaacaaatcaaaagaagaataatacttcacggcccatgaaaattataacaaattcaaatttcagtccataaataaagttttattggaacacaggcacgcccattggctttcggattatctctggctgcttttgcactacagcagcagagtggattagttgtgacagagaccatatgggatgctctcactgcttgtcactgcctctggcgcactacagatcacaccgatgcagccgtaactcagttttgcctcatggcccacacagcctaaaatgtttcctggccttttacagaaagatttgccaacgcaagttaagaaggagaaggctttaagaaatgtttctggccgggcgcagtggctcatgcctgtaaccctagcactttgggaggccaaggcgggcggatcatgaggtcaggagtttgagtccagcctgaccagcgtggtgaaaccccatctctattaaaaatacaaaaattagccgggcgtggtggtgcgtgcctgtaatagctactcaggaggctgaggcaggagaatcgcttgaacccaggaggtggaggttgcagtgagccaagatcgtgcctttacactccagcctgagcgacagagcaagactccgtctcaaaaaaaaaaaaaagaaaaaaagaaatgcttctaaggaagaagggaagggacgaggcttgctagcctactgaacaggagaggaaaggtaaggggagagatatcagggaacttggtggacagatggtggtgacattcactaaagtttagagcaggggtgtccaatcttttggcttccctgggccacactgaaagaagaaaaattatattgggcctcacataaaatacactaacgctactatagctgatgagctaaaaaatatatatctcacaaaaaaaaaa[132 bp omitted]atggagaaatcccatctctactaaaaatacaaaactagccgggtgtggtggcgcatgcccgtaatcccagctacccaggaggctgaggtaggaggatcgctagaacccaggaggcagaggttacagtgagccgagatcacgccattgtactccagcctgggcaacgagagcggaactccgtctcaaaaaaaaaaaaagaaagtttccaaatttgtgttgggccccattcaaaggccatcctgggccacatgttccacaagcttggtttagaggttgggaacagaaggcagtgaagaggctgggcacggtggctcatgcctgtaatctcagcactttgggaggccaaggtgggaggatcacttgagcccaagagtttgagaccagtctgagaaacatggtgaaaccctgtctctacaaaaaatacaaaaattagccaggcatggtggcaggtgcctatagtccaagctacttggaggatcgtttgagcccaggaggtcaaggcagcagtgagccatgatcatgccactatactccagcctgggcaacagagcaagaccctgtg[138 bp omitted]tggtgaaaccccacctctactaaaaatacaaaaattagccaggcatggtggtggaagcctgtaatcacagctactcaggaggctgaggcaggagaatcacttgaacccaggaggcggaggttgtagtgagccgagatcacgccactgcactccagcctgggcaacaaagcaagactccatctcaaaaaaaaaaaaaaaaaagaggagagagatgatgagtttagttttgacatatgaaatttgagtacctagaggttgaatctgaaaaccagctccaagctcaagaagagtagtagacggagaactaggaagttaaactaaaaacaaattcttaaagatggtagggaagacagaaaacgtgaagaaaggaggtgggtggatcctcttaagactcctcaaaaacttctcacagttcatatacctactgcaactaaactttcacaacgtcacaacatgttctggtcagccaaggaaaagccagagagatctgccagccgccacttcttcttctcgccataggcataaataccaccccagaagcctcgccattgcagggagacagagaaatatactaattttgcatttaagtacagaggaatccctcctgacattttgttagaaagcctgtcatgtgtcgccttgctgctgtgagtaataagacagcacagtcccctgggctggcctgataatagtcaaaataccttacatgtacacaaggtttcctggtttaccaaaaaacattttctttcaccagcgaagtgaggatcagtatccgtgttcacagacaaggtctaccacaccatcagaaaaaagctgggcttttccagactgagaagagtacgtgaaggtcagcctctcattcatgtttctaggtggtaacagacatcagggatccacagagcggtgaacagatgtcagggattcccgccgacttgttgctaagggaacttttgtgaaaatgccctgaatccactcaatccataagccttgctcattgctttaaagtcctgtggggtagccactgaccagtccagcacacaagtgtgacaaaagaggtggttccttctgagctgaggctgacagagtggtgggccaaaggtcattttctaacaccaggagctacaaatactggccacagcccccataccaaggaggagggtgatttagtgaagatgtcagaaagcacgctggtcttttcagtcacaattacccacccctccgagccacaagccctaattgcaccttttgtgaacagagttgatgactgactgaaaaatactagcatgagggacaaggtcacactcattttgggtgattttcatgttgcagaaagaaaggaaaaggctctgtattaaaatcaatttgtgtaatatagcaaacatctattagatgtcagggagctcagatccactatgtctatgaatcatcagcactgaacagccctggcctaaaaaaagctggactggtatgtcaatggcttagtggacaggcccagagccaggcaaatctgatttcaaattccagctgcatcgtttatcatgtggcctttagaaagaaacctctagagtcaaaaaaaaaaaaaaaaaaccctccaaggattgcgatagaggtagaactgccaagtctctgcattttacctccctcttggggttctctctctcatcagtctggcccagcactacctcctcactaatggatcatctgtcccatgtatgttctccctagccttctgagggagctagtctgcaatatggccctcgatgaaccacgcctccctcataaccgcacctgtacccacctcccttccaaattgactctggacagacctgtgactactttcccaatagaatgtggcagaaacgatatgccagttctgggcccagaccttaagagggcctggcaatgtatgcctttgcattcttagaagccagctaccacataactcctgaagagaaaggccatgtggaaaggccctggagaatgaaacactacatggagaaaggcgccacatggaagaacatcaaagcaccagacaggtgagtgaagatgacattttggaggctgcagtctagttgagcctccaagactctgccccagccaccatctgattgcaactgcatgagagacactgagacagaccagcagaagaaccacccagctgagccccgtcaatccacaaaaccatgccagataataagaaattgttgctttgaaacactaaatcttggagtggcttgttacatggcaatagataaaacatcattccttaattatccatagcacagcccactctctcccacagacactccttatcaactcctgcagcacaactgcatgaacccaaaatgggagaacaaagggtagagtgaagaaaatcaagtttaacggtgaccctcagcagccattctagttgtgccagcaaacagtgtcatattctgttagtaacccagaaagaaaggaaaaggctctttttaggaaagagaaaaggtccagattatccagccagatcctggattctaagaataccacctagttcaaagaaagctctattttgtttgcattccaatcccattgtcccccagaattatttcccaaaagctctgggaagttttgtagatgccttacaacattccccaggtccctaatttcttctctccattcaaggaaagtacaggccacaggaattcctggaccctattaaaccctccaaccactgacctgtccagccactgggcttgtcctggtaccatgtctttctctccaaattttccccaggatggagatctaggattctctatccaccttccccaggagctatttctcagccttgatgtaccctagaaagctggtggaaatattcccacatgtggggttcccaggtctatggaggcaatctcaggcctagcttggagctggcagaacatgctcccacagctcctatctctggtctcaggtctcttc[281 bp omitted]atttttctagttgattttatctaataaccagctgtgggccttggctgtaaggcctattccttttctggaggtaggtgtttccctctgcccatcctttgaagagctgcaccaccccgagtaggaagaacccttgtggccagagtccttgggcctaccagagacctctacacttccctgcctgtgctgaggttttcctggaagctgctctctggaagccaagtatgtgctataccatttccttggagtcttgaccaaagagattgccccaaaaaccaagacctcctccaagctggcctcctcccaagggctagctggccactgggtcagatctggtgactctcttggagttagctcccaactcccctcccccgtgtatgcttcctgcaaaggctgggtctctcggttccccttgcttcatctgaacaaggaagatctccttgggaagtatccagtgtgcacacagtattcagtgcctccctcccctccaccaagatggggtttcctagtatcactctttctatcagggtgaaagttccgctggagtagggagcacattagagatgccatattcatctgtgtacccacaatcccatccctaggccaggaggctagtacagtccatctgtctgtacttgtttctccaacagctgccctggccttctgaactccatgctcccaagcaagctgagtgacagcaccacattggctgacatctcatgaggttcgccatctccagtatctatgggccccctctctagtctcatgagtccagatgctggccagtctacccaccagcctggggacctctgcattctctgagtctgcccttcaggactcaccccatcccaagcaactctgcttgcatgtcctctatctctacctagccttcagccttgaggtccaacttgctcatgtaggaggttcccagatgccaagcacctgacccacatgcccccctgttgaaactgcatctgctttggccctgagaagagtcccacccagtacttaggatacaggactcgggcccactgtgggaagacccccagctggttctgagtaaagtcacactttggggttagcagggaagatcctccaagttgctcctggatgcagctgtcctcgttttagccctagaggttcagcctccccttcgcggtgctgtcaccaacatgctgacctcaggggctgcgcatgccccttttccccatggatccagacccttcgctcacacgctgtttggcatagttgagcccgggctatcatgtttaaaaaaggcacaggcgcagggggtgatactcagtcatctgagctgctaacaaaacacgcaagcattactagttggggagctgacttcgcctctctcatattcagcttgcttgtctataaaatgggggaagtacctcacccttcacagagctgtcagggaactggtgataacgtgcacacactgtgccaagcaggtgctcagaagtattgctcacgcagatggatgcttctgttgcaagttactagtcaggaatggtctgagaggccctgagacaccagagatctcttacctttgtatatgccagaggatgggacagacacacccaaaactgtcccagttgttaattccgcttgtcccctggccctggtccatcgtccctttcccggaagaaaaagcagcactccactcttgctaactaacacctacccagcctcacccctacacaaaacacagctggctcagtccagccagggatgctcctcaccggacagacatccatcagccaaatttccacatcagaatttcctggaaaagggtgaccacccgaagaactcccaaaatacgtatctatcccagggcttcaagctagaaacaaggaggccccttgcttctcatgtaagaagcaatacgttcgctttcttttacatccgaatctcgggaaaggaactggaaaagccagggcagggcacacctgagcctctcctacaagtagggtatctccggattctccagatacagaaccaagagggttcctgcaacatactctgctgacagcccatgaaagctcattccagcagcccctaaactttgctcaaatgctactgatgcctttaggagagattttgttgttctctggacctgaaagcaatctaatgtacttttataaggccaggctcttgctgacaatgttgccacaggatacatcctcaggcggactcaccctgtaaccatttcacttctttctttcttccccccgcccccgatgaattgcactgagcattctcagtcaaaatttgctactttctctgtgaagtaggtcaagagttaaataataaataaattcagcctccatgatttcttccggcagtgttttaccagaatgtttaggaatactgacaccattgaaggtaactgttaatttagtctttacaagaatcctgggggcaggcgggcttctagtaaaggggatgtcctggaaggtcacccccccacacacaaaggactttagaaacttcgggtctcactcaggctgtgactgcgagctcagtgattagaggacagcctgtcacatagacaataaacagccagccgccttgcctcagcaggtcctgtgcagccctggggccaggccagaaccccaggaacaagccactttcgggttctgagccttagcctcggggagctggaccaggggagcaggcagtggcggggggtgctacggcaccccaggatcaagcctgctgagggggctcgggctggtggccagcaggctcggctgaccagcaagtgggtggtcccgaggcggccaggcagcctgacccaaggcagcacgaccgtccacgggtcatcaggctctagactccggggtggagacgcggggctgcgggaccgagtcggtgccactttctcgcacccctgatcctccgtgcctcttcccaagaccgccagacccttcaccggcccctgccactgccgggaacgctcccgcctgctccttaactcacacaggcaacaagttctcgcttcctcagagcagccacggtgtgctccggaggcccggcgcaaggtggaagctccccgcgagtccgcgttgcccacgccccgaggggcgcccgctgccgtcgctgccccccaggagcgtggagctacaggtagcgccggcaagggctgccccccggggcgcccctccgaccgggacgctgcggcatccccggaacgggcaacaggtacgcgagcgcaccgaggaccgcagccccggctcctacagccccggccctcgccccttacctccagcaactgcacgtagctcgccgggaaccagccacggagcccgtcctccttctcgccttcccaccagccgccgtccgggacctgcagcagcgtgatcagctcgcccgcggcgaagcgcagcccctggccgtgccgctccccggagaaggggtacagggtccggcagcgagcgccggacatggccttggcgcccgggttcacagcgcagcctgcattcccgccgagccccacgggctgggcagcggctccgcggggtcccaggcgcccggcgctccgggctcccgcgctctgggcgcgcgccgtctctggggtgcgcgggggtcctcaggcaggcgggggacgcgcgctccgcgccgggaagcagagactcgttggcttcgcagagcgagcggcgacgcccccgggccgggcagctcgcggatcctagctctgggctggggggcggggctcagggggaggagacccaggcgccgcgggctccggagacaacttcccgggaacgcggaacgcgggctgccgccgcgagggctggccggggccggggccgggaccggggccggggccgccctggcgcgcggaaatgcgcagctcccccgggaggtgggacccggagcatcccccgcggcaggactccgcggcgggcggccgtggagaggagctggcggccgggtggccgggcgggggttagctcactggcgagggggcgggccggggcggggccagggcggccacgcccgcggagggctgcgcgctccctcgcagaggggcctgtcactggggagaggggctcccactcgcgcccccaccgccggggaccgcgggaatggaaacgcccctctgttctgtgcctgctttgtaggcctggcggcccgtggcgtgcgggcggcttcttcgaggtgtctgcgagggatcgtttgtggttgtcattgtagtggttgaacctggggttgaacttgtctcaccggaaactgaacaatgggtgaaagacaggtttgaagcctggcgcctgagcccagcagcctggtggcagcgtggcacgctggagggacggaatggagagaagacggggtcggagttgatagaattggaaacagtcgatggggataaatggaggaaaggcgaacggtgagaggaacagcaccaatgcttttacttgcagagggaaggccggcccagggtaccagccctcccgaaatcgagatgggttggctaaagagtctacactcatgtagtcagtcaacaaacattaccaggaggctgccatgttccatgcgatgtgccaggtactacaaacatcatttgggccagtccctgctctccagggaccagtgaacctgagtgctgcagaatgttgaccttgaactgaccgtacagaagtaaaagaaagcttggtttctttgctagtctactccataaaaaattttaaagaa[139 bp omitted]caaggtgaaaccccatctccactaaaaatacaaaaattagccgggcgtggtggcgggtgcctgtaatcccagctactcaggaggctgaggcaggagaatggcttgaacccgggaggtggaagttgcagtgggcggagatcataccactgcattccagcctgggtaacaagggtgaaactccgtctcaaaaaaaaaaaaagctggaccctttaatacgcctgtatacctctgtctactccttcccccctcccccagtcaccttctgtggctccctattgccttttaaatttggtacaaacttctctgcctgtacatttcaggccctccacaacgcctcctctagcttcacctcttactatgactgcctagatatccattacaaaaccagtcaggccgggctccaagagcctgaagatcttgcgcacctgtctatgctttgaatcagaccctggcacagagcctttcacctagttcaatggttctcaatcctggctgcacattacagtcattatgcaactttttaaaaatactcatgcccaggttttaagagtcactactgagccctagtctgcagctaagccatctcacctgagcagcctccatctgttctctggccatgggcaaagtgacacaagcagattatttgtaatagtccatcaattgcaaagtcttgaacattcgcttggccggaaatataaagaaacaaactcttgaccacagtcaccactaagagtcccttaaagcggagctgcataacttcatatcaaaaacagtcattaaaaatagctggcccaatgaagttttaaaagagatacaattccttgtatcaggaaaatatgtgacttccagcaggctgttctgaggcttcattcctgatgatgtggcctgaatcaaggtaggacaactgatttccagccatcctgcaaccctaattctctgcatgcccgtgaggaactgtgatccagtttggacttgagaaatcgcagcctacacagcatgccatacacttgagttctacctgacccacctcaaacattcctgcagcaaccaaaaatgataatagctgttaatttctccacttaattcatttcattcctgtaatcctacgagctgatgaggtgactgttgtcccagttttcaggtaaagaaactgggctcaaagagtgtgacttgctcaccatcatacagctggtcaacagcagaatcagctttgaactcaattctagcttattgtacactggtgttgctttctgtcgtcccccctgccagtcagaaagcaggtatcctagtgactcacccacaaatagcatcttaagagaaagttctctaggctgggcacagcctgtgagagcttatgcctgtaatccccacactttgggaggccaaggcgggcggatcacgaggccagcagattgagaccagtctggccaacatggtgaaaccccatctttactaaaaatacaaaaattagctaggtgtggtgccgcgtgcctgtaatcccagctactcaggaggctgaggcaggagaatcgcttgaacctggaaggtggaggttgcagtgagccgagatcacgccactgtactccagcctggcgacagagcaagactccatctcagaaaaaagaaaagaaaagaaaagaaaagactctctggtgatacccaatgtcagtcttcatagaaataagactggactagcagttagtggaactcctgttgctgatctcttatcaatcaggtaacctccaaatcctcaagtcttcccatacctttgggtctatttccccgtctgtaattggagatcgaatccagtaactggaatatgggaatttaaatggttaaatgtagttagtggttaaatatgttggctctggactgcctttattcaaaccccatttctgccactttctagctgtgtggcattgggtgatttacttacgtctctgagcgtcattttcctcatcactacaagaagacaacagtagtattaatatcatagagttattaagaagattaagtgaggaagcatgtaaactgtttagagcagtgcctggcacattaaatgcccctatgttagcgattgtttttatctatccagttcaagggtcctggtgatttattacgtaacacttcttttttaactaagatttctagagcaacaatagaaggaggaactcttacatctttgggatgccacaaattttgtagaaacacactttggctttctgttttctcccaggatcttgaaggaaagataaattcctcccttatcaattttccctcctgccttctccctctctgatttatattactatcttgaaattgtatttaaatctttaattatttttgctttttttttttttaaattgagacaagatctggctgtattgcccagactggagtgcaatggtgtgatcttggctcactgcatcctctgcctcgcgtctcaagccatcctcccacctcagcctccagagaagctagctgggactacaggtgcacaccaccatgcctggctaatttatttttgctttttttttttttttttttttgagatggagtctcgctctgtagccaggctggactgcagtggcactatctcggctcactgcaagctccgcctcctgggttcatgccattctcccgcctcagcctcccaagtagctgggactacaggcgcctgccaccacgcccggctaattttttgtatttttagtagagacggggtctcaccgtgttagccaggcaggtgtcaatctcctgacctcgtgatctgcccgcctcggcctcccaaagtgctgagattacaggcgtgagccaccacacctagcctacttttgctttttaaaaaaataataattattattaagtcttattttactggttagactgttagtaactcaggagagggatagcatctttgttttaaatttccatctatcttttttttttttagactgagttttactcttgtcacccaggctgcagtgcaatggcatgattttggctcactgcaacctccacctccgaagttcaagtgattctcctgcctcagcctcctgagtggctgggattacaggcatgcgcctccacgcccggctaatgttgtatttttagtagagatggggtttcgccctgttggccaggctggtctcgaactcctaacctcaggtgatccacccacctctgcctaccaaagtgctgggattacaggcatgagccaccatgcctagcctatctatccttcttaaagcctaacgttgactcatacaaaaagcaggcattcagtacttcttgatcttttgcatagattgtttggaccctgttcatatttagattttctacttgctaagttgttgtataaacctgtgtcagagctttctctagacactgtgcatttgttagttatgtggtggctggtatttcatttctacccaagacaaccttatacacctttctatcagcctatggatggcagagaaatggaaaggtttccatttctttacaacgttaaacatagccaggcgtggtcgctcatacctgtaatcccaatgctttgagaggctgaggctgtgggttcccttgaggccaagagtttaggaccagcccagacaacatagtaagacccctgtctctacaaaaaataaaataaaatagaaaataaataaaataatttagccacaggacgtggtgacatatccctgtggtcccagctactcaggaggctgaggtgggaggatcacttgagcctaggagatcgaggctgcagtgagccatgaccacacaactgcactccagcctgggcagcagtgcaagcccctgtctaaaaaaaagaaaaaggaagaaaaagcaagttaaatataaatttacctaatgacccagcaatttattccgaggcatctacctaagagaaatgaaaacatatgtccacacaaaacttgtagtgaatgttcatagcagtattattcacagaagtcaaacagtggaaataatctaaatgtccatcagctggtgaatagatagacaagatgtagtatgccaatacaatggaatatttactcagccatgagaaggagatattgattcacgctacaacatggatgaacctcaaagacattgtgctaagtgaaagaagccagacacaaaaggcaatgtattatatgattccatttatatgcaacgtccagaaaaggcaaatccatagacacaatttaaaaattagtggtcacctggagttggagctgcaaacaaggaagaaagaaacaaacacaaggtttctctgaggcgatgtaaatgttctaaaattagtttgtggtaatgatcacacaacacagtaagtcacgaaactgtacacataaaacaagtaaaattcggggcatataaattatacctcaaaaaattgttagtgttgagcaaaaatcaaaattcataatgatcttcatcacccaacaagagttatctttttcaactcatgtgtgctatttcattcaacaacagctcgaagaggtgttaaacacatattagaaaatggacagtgtgctgggcctagggatagagagataactatgacagctatataaagaatactggctgagcatggtggctcatgcctgtaattccaaagctttggaaggctgaggttcgaggatcacttgaagccaggagctcaagtccagcctgggcaacatagtgagaccccatctctataaaaaatttgctggacatgggggcatgtgcttgtagtcccagctactagggaggctgaaacaagaagatcatttgagcctaggaaagctatgattgtgccactgcactccaacctgagtgtcacagcaagaccctgtctctaaaaaaaaaaaaaagaaaaataggttttaaaagaaaacaattcctatagatcaataaagaaaacatagacaacccaacagaaaaatgggcaaagaacttgaacaggcatttcacaaaagaagatatccaaatgacctattggtcatattaaaagatgcacgacatcattaatcatcaagaaagcatgatttgcttttctttgattttgattaaatcataagaaggtatcaatatacactcagaagtgatgaagataaaaacagaacagaaaataccacatattggagaggctgtgctacacccggagctgtcatacactgctggtgagagcctgttggaaaattggcagtatttagcacagtggaattgagtgttctccataactcatctaatccccttctaggcatataaccaactaagatacgttgatatgtccaacagaagatgtataacaatgttcatagcagcactatttataacagccccaaactggaaacaacccaatatccatcaaactagaattgataaatcatgacatatttatacaatggaaaactctacacttagaataaacaggcttggtacaatggctcacctctgtaatcctagaataccgggaggctgaggtggggggatctcttgacaccaggagcttgagaccagcctggtcaacacagtgaggcctcatctttactaaaaataaaataaaataaaataatttagccaggcatgatggcatgtacctgtagtcccagctactcaagaggctgaggtgggaggatcgcttgagcctaggaggtcgaggctacagtgagctgagatcacaccactgtactcctgcctgggtgacacagtaagaccctatctcaaaaaaaaaaaaaaaaaagagagagaataaacaaactattgctacatataagtgaatcccatagatgtaatgtggagcaaagagcaaaagcagccaaacactaaagagcagagacatcatgattctgagagaggaggaaggaagaaaccagtcaggcaggcagttagggtgggtccttggtaaaattatttcaaacaaaacaacagcctgaaaaatcaaactgcaggcacagattagggaacttgcacagggtggcttgcctaagacatgccaacagccacatagataagaaaggctacacaggggacttgcccagacatgcccacaatggaaaattccaccccctgacacatgcgcagtaagaggaacaaagcaatgtggagtaattcaagctaaggagccccatgtgcactaggaggatgaggtggagctaccagaaattcacaccttatacaaatgagaagcccagccctcactggtttcttataaaagcctctgtattcaactgtgaaacggcaaccctctttcaggccccctctctgcaatggagagctttctcctttcacttattaaacttttgctccaacctcacccttggtgtctatgctccttaattttcttggtcatgagacaaagaacttcaggtgataccttgggcaacaccaaggtacaccaatgctacattgggtgcattggcgagactgtaacaattccatttatatgacattcctagaagtcaggagaggagttattttggggaaaggtagtgacggcacaggggtgtctaggttgctgataataatctattccttgatcctcttgctagttacatgagctgttctccagtctgtatactaatttgtgcgcttctctgtgtggatgctatttttcaatatggtttgttaaaaaataatagtattggggggaggggggagggatagcattaggagatatacctaatgctaaatgacgagttaatgggtgcagcacaccagcatggcacatgtatacatatgtaactaacctgcacattgtgcacatgtaccctaaaacttgaagtataataataataataatagtaatagtattctggctgggtgcggaggctcacgcttgtaatctcagtactttgggaggtcaaggtgggtggatcacctgaggtcaggagtttgagaccagcctggctaatatatagtgaaaccccgtctctactaaaaaaatacaaaaattagctggggatggtggcgggcacctgtaatcccagctacttgggaagctgaggcaggagaatcacttgaacctgggaggtggaggttacagtgagctgagatcatgccactgcactccagcctgggtgacagagcaagacttcatctctctctcaaaaaaaaaataataatcacaatggtattctaatctcaaagaatttgtagtctaaattctacagagatgctttccaaacttttttgactctacacccctatcagtaaaactcccggagatatctacttctcttatctatgaattaaatagatgaaccactaaactaataagcatattatcatagaattaaaaatttaaaaaggttatattgaagtagatgtaatattcaaatagctgttctaatattgtcttcctgcaccataatggaagttttatgtacttctcagtgatcttgagaatcggtttcaagaagatactgggaagggaaagaaagttaatatactgaaaataagcattttggaatcatgacttcagagaaataaatgggtccagttctccccttgcagtccggaagaaacctggcgttgggcctccatggaagaggaagtgtgaagagttctatccatcccttccttgattttctcatccagaatctcagccagagttccagccaaagattctgaaacttaaacatgtataaggatcactggagaaacatgttagaaaggatgcctatttttaggccaccttcccagagattagtgggtctgggatgggacccgggaatctgtgttttcaacaaaatccccagagtactgtggggttttcagactgtatttcaaaggttgttgggccgagtgcagtggctcacacctgtaatcccagcactttgggaggccaaggccggcagatcacttgagccctgtagtttgagcccagcctaggaaacatggtgaacctcatctctacaaaaatacaaaaattaggagctgcaattgtagcagagcactccagcctggatgacagagcaagatcctatctcaaaggacaagggggggttttattttcaggtattattcgtactctcagagtgtatttgtttatttatttattgagatggagtctcgccctgttgcccaggatggagtgcagtggcgccatctcggctcactgcaacctccgcctcccaggttcaagcaattctcctgcctcagcctcccgagtagctgggactacaggcgcccgccaccatgcccagctactttttggatttttagtagagatggagattcaccatgttgcccaggatggtctcgatctcttgacctcttgatccacccacctcgcctcccaaagtgctgggattacaggtgtgagccgccgcgcctggcctagagtgtcttcatttataagaagggtttacgttggcatcttgtttggccaggcccaccaatgtttaaaaaggggggaaggaggctgggtgcagtggctcaaagcagtaatcccagcactttgggaggctggaggcaggtggatcacttgaggccaggagatcaagcccagcctggccaacatggcaaaaccccttctctgctaaaaagtacaaaaagtagctggctgtgtgccacacgcctgtaattctagctacttgggtggctgagatacgagaatcgcttgaacctgggaagcagagcttgcaatgagctgagatcgcaccactacactccagcctgggtgacagagactctgtctcaaacaaaaaaaaaaaaaggtaaagaaaaaaaagagaagggaagaggaagcaaagctagaggcagacagaaaacagtaatagatcaaagaggaaagaaacaatttggggaacaggagacagagaatatagaataagaaaagaagagtaggatagaaaagagaagggaaaggggcgagagaggggaaggaggtgggagcgtggagaagaaagagaaaacaaagcccagccttctcccaggtcttccaagatctccacccactccctcacaaacacagcttccctggtgtaagctaaaggtttcatttgcagaagcagcatgaagcaagagaaaagaagaagggaagaaataagttgtgtgaccagaaataacacaaactgaagtctgctttttcactgctattgcttggtgggtgtggaaaggagttccagccccatcctcactgttccctaacagcagcacagaaatatggaaatgagattgccctttgggagtaaataacagtaaaatatccacggaggagcgaggctgagcagagatatgcaaagccacagaaagagacagaaaggcagaaagtctccagggccaggacccaactccgatgtgatgtcgctattaacatatctgaagcttggaaaaatccacccaaagaagggtgggctgtctaagaaaagcttagaaaagaagtttacgaaaattgctgtccctccctggctcagtgttatccctccttgtggctcctttgcccagggccacacggtcccttcattcttgaaacacacacacacacacacacacacacacacacacatgcaggcacgcacgcagaactacccttgattacacacccagtctgcttctcttgccccgaagacaagccagatcctaatttccccagcgttgtggcagaaactgaggttttcatttgtaggtggtgtccctctattgtgtagaaatggtt[174 bp omitted]ggtggcgggcacctgtagtcccagctacttaggaggctgaggcaggagaatggcgtgaacctgggaggcggaggttgcagtgagccgagatcgcgccactgcactccagcttgggtgacagagcaatactccatcaaaaaaaaaagtagcttaggctgacataaatccctggggaatcttgagcttcagaaacaaacaaaacgcacaggaatgacctggccacgggttcttggcttttttgtggacaaaggggctggccaaggaagactgtcaggaatagcacatttctttctcagaacaaatccccggcacgagtcttcattcttttgaagataaaaataaattcggaattaatcacaacagaaaaggaacagtgtcttcaatgactataattagttctccatttattaatgaagactccaatgattaggctcatccgagtcccaactgttttgcttggtaattacacacctaagaaaaggggtttcacctctgtaaacctcaatttcctcatctgcaggacagggatggggggacctatttcattaggccgtggaaaagattgcagaaagccgtctgggggatgtggttggccgagagtccagctgtggggaatgtacagcatgccttctgcagagaactggcttcagaccagaagaaacttgacttgatgtattcagaagccagcatgttctgtggaaacttccaggcctggtatcacagggagtagggaggtagagggaatgcttatttacactgtagactcataaaaattccttccagagcctctgggtacaacctggatgaggtaatagaacgcacatttacatacctgtggacttccccagcaggatctccctgtcagacaaaggaggatttcccaagcccttcccacggtcacctgaaggtcagaggctgagaagcaggaacgagttcatggggacctgtggggcagcctggacactgggcagaaagggcttcatgagaaccatcttggaaatgaaagggcacatggctggggcctctctgggcagtcagagttaaaataataacacagggaagcctggcattcccagaggccaatatccagatgcttcaacaatctggaattcggccgggcgcagtggctcacgcctgtcatcccaggactttgggaggctgaggcgggtggatcacctgaggtcgggaattcaagaccagcctggccgacatggtgaaatcccgtttctactaaaaatacaaaaattagccagacgtgatggcatgtgcttataatcccagctactcaggaggctgaggcaggagaatcactgaatccaggaggcagaggttgcagtgagccaagatcacaccattccattctagactgggcgacagagggagactccgtctaagaaaaaaaaaaaaatccagaattcagtgacgactgagcaaaaggaattttgaataaacaaggtgaaaagtgtgtatcatgttgttcattgttgaagggagcagtagggaaatggggttcatgagactatcttctctacttgtttataggtttgaaatttttcataataaaaaaaaggaaggccaagcgtggcggctcatgcctataatcctagcactttgggaggctgaggcaggaggattgcttgagttcagcagttcaagaccagcttaggcaacctagtgagaccgcatctctctacaaaaaattaaaaattactcgggcatgatagtgtgtgtctatagtgccagctactcgggaggctcaggcaggaggaccgcttgagctcaggggtttgaggttgtagtgagccgagattttgccactgcactccagcctgggaaatagaaaaaaaaaggaaatatatgcatcttagcttactccatatacctactcctctgaaagaccatcagaatctcagttagagcctatccactcacagttttcaaacaattctaacaacagatctttttaatctagcatttttcagataataatgttaccggaaaggggtctcaatccagaccccaagagaaggttcttggacctcaagcaagaaagagttcatgattagcccatagagtaaagtgaaagtaagtttattaaaaaagaaataaagaatggctactccataggcagagcagcggcttgggctgctcgactaaggatacttatagtattactcgattacatgctaaacaaagggtggattattcatgagttttctgggaaaggggtgggcaattgccagaactgagggttcttcccctttttaaaccatatagagtaacttcctgatgttgccatggcatttgtaaaccgtcatggcgctggtgggagtgtcccgtagcatgctaatgcattataatttgtgtataatgagcaggaaggaccactagaggtcactttcatcgccaccttggttttggtgggtttcggccagctcctttaccacagcctattttatcagcaaggtctttatgacctgtatcttgtggcgacctcccatctc[136 bp omitted]cctgtctctactaaaaatacaaaaaattagccgggcatggtggtgggcacctgtagtcccagctactcaggaggctgaggcaggagaatggcgtgaacccgggaggcggaggttgcggtgagctgagatcttgccattgcactccagcctgggcaacagagcaagactccatctcaaaaaaaaaaaaaaaaaaaggaaagcctaacatccttggaatgcagcccaataggtcttagccttattttacccagcccctattcaagatggagttgctctggttcaaacgcctctgacaataatgtatggaagaagatatcgacagcaggaaggagcaccagctgacaacagattgacactggcaatgaggggtggggatagggatcagagagaatcattttaaaagactcaagaaaacaaaaggtgtctaaaccagaactatttagcaaccatcaagagccctttaagatgttggtaatcaatattcattaaaagacggagcgctactcttcaaatataaacattatgcaaatataaagtactataagaatgacaatgaccctcaatcattccattttaacagtcaaggcagtgtgtaatactttcttgaataatcttcacccatagtggttaaaggatttcaagttatttcaagtgtttgtaagtgtccaaagacacaagcacaacaaatttagcttaaagatcttaattggtttttatttgtgattctagaattgggcaccacttccttctgtaaaacagaatgagtgttcccacgagctgagcagaggaggttggttttatattcagaaaagagctggggaaagcagaaacaaaatgtggactgctatttcaaagttaaaagaccgggcacggtggctcactacctgtaatcccagcacttagggaggccgaggaaggtggatcacttgaggccaggagttccagaccagcctggccaacatagcgaaaccccatctctattaaaaaatacaaaaattagctgggcgtggtggcacatgcctataatcccaactactcaggaagctgaggcaggagaatcacttgaagctgggaggtggaggttgcggtgagctgagatcttgccagtgcactcactctagcctgggtggcagagggagactccatctaaaaaaaaaaaaaaaaaaaaaaaaaagttaaaggttaggccaggtgcagtggctcacacctgtaactcctagcactttggaaggccgaggctggaggatcacttgaaggccggagctccagaccagcctgggcaacacagtgagaccgcgtctctacaacttttttttttgaaattagctgggtgtgctggttcacgcctgtggtcccagctgctcaggagactaaggcaggaggatcgcttgagcccaggagtgtgaggttgcagtgagccctgatggtgccactgcattccaacctgcacaacagagtgaggccctgcctccaaaaaaataaataaagattaaagccaagggctcttgtttatcatgccagctaaaactggcctgtttaggggattatctctctctctcccggtttctcaaaaggtcagataaacaacttagcttctgtttggtagcgtggaactttagcatgagtgactccattttggtttggtctgttgggcctggtacaggagctagtgcaaaccaatggcttcctataaatttgtgcatattaggtgcttcctactggcctcctcactgcagccaccctagaaatctcagcatatattctttaaggcactcactaaaagaataaccctggccaggcatggtggctcatgtctgtaatcccagcactttgagaggctgaggcgggcagatcacctgaggtcgagagtttgagaccaccctgaccaacatggagaaaccccatctctactaaaaatacaaaattagccaggcatggtggcacacgcctgtgatcccagctacttgggagaggctgaggcaggagaatcacttgaacctgggaggtggaggttgtggtgagcaaagatcgcgccattgcactccagcctgggcaacaagagtgaaacttcgtctcaaaaaaaaaaataataataaccctgacttgtgagcaaccatttgccctgggcagaacttcaggaattaggggtaaactggggatggaaataattctgaagaaaagctgctactggagaaattattgctagttattgctgatcatgtattacaaacataagtgaaaggaacagttttgattcttggacaaattcatttgtgtagaacaactcattttctaactaaaatgaaatgagatggctgttaatattggtcacctgggggaagaggctgggcgtggagggggcgggtgagaggaaaatatcctggcattgtttcattagctacaatgagctcatattacttttgcaatctaaaaaagattaaaagggaaattaagtattcataataagtaaggaaataatgaacatagatttttgtacctgtggcccttcaccaggttagttaggagatcaagatacttaagcctatggtgagttccaacgtccacctccgctctctttatgggatctgaacctactgtcatcctagtattcttgtgcggtgacttgtaaccttaaactctgactcttggctcacgtaaaaatcttacaaaagcgattgtcctacaggaacaactgtctgctagtgagttggtattagattaaatcatgcaaaaatatcaatgccagatcatttttggtctacatgcatagtttaacttaacagtttctttctttttttttttttttttgagacggggtcttgctctttcaccaaggctggagtgaaatggtgtgatctcggctcactgcaacttccagcctccgggttccagtgattctcccgcctcagcctcccaagtagctgggattacaggtgcccaccaccatgcctggctattttttgtatttttagtagagatggggttttgccatgttggcaaggctggtctcgaactcctgacctcaggtgatccacctgccttggcctcccaatgtgctaggattacaggcgtgagccaccatgcccggcctaacttaatagtttcaatgcaacatccccatccacagtgaaccccaatggataaagtgaggcctatggaagtctccaattcacccagtccctgccacattccttactaccacccacgccacaaagcattgccttatgttatgctggatgagtgacatgcaccgccagctgctctccagaattactgaaagcctgtgaaaaaggtagatacctgggaccaactcaggagattttgaaataaggagatctgggtgtctgtattcttgtttcccaggtgatttttatgcacgggtccggcccagaaccttagcatagtgcgatgcttcccacgctttactgcatgttagcatcacctggcaatttcagaatggctgggagtgacaggcatccatatttttatttttattatttttatttttatttttatttttttgagacagagtctcgctctgtcatccaggctgaagtgcagttacacgatctcagctcactgcagccttaacctccctggttcaatcattcctcatggctcaacttcccaggtagctgagaccacaggcacccaccatcacgccaggctaattttggtgtttttagtagagatgggtttttgccatattggccaggctggtctggaactcctgacttcaagtgatctgcccgcctcagcctcccaaagtgctgggagtacaggtctgagccaccgcacccggccgcatccacatttttaaaagatcccccaattatgtcaatgtgcggccaagtttgggaaccactgtcacagtgaatgacagtttgttgaccttcatttccagaggcagggtcacctgtagcccagacctgagcacgtcatcagggagtaggaccagcacaggagggcaaagatctgcccacatggatgactctggttaggtcctgggacaagctgaccctgttctctagggctggacttgctggcttggcccacctggctgcctgcctccagggatggaacacctgctgggcctcactgccccagcccccacggtttcctgggcagccccgccttccgctgcccactccgtgagggatatgcgcttgggagctgcttcccctgcctgggagtgcagcccaggacccaccagggagcatgttgccatgacgatggtggcagcctgctccccagcccccttctgccaccgtaaaagccccgtggaaaatcagaactcacagggctcttctgactgcctggacttctccacaggaaagggttatgggagctttctcccctctgtgccatttgcaaagctggaggagggaacaacagcctcaaaacaaaaatgcaattttcccactttattgagatacgtaaagaaatcaattttcttttcttttttctgtttgtttttgagatggagtctcaccctatcactcaggctggagtgcagtgatgcaatctcggctcactgcaacctccgcagcctgtctcctccccctcccccgggttcaagcaattctcctgcctcagcttcccgagtagctgggattacaggagtgtgccaccatgcccggctaattttttgtgtttttagtagagacagggtttcgccat[137 bp omitted]tgtcatgatgtttgtcaagagaaaaacggggaatgtatgaaggagaaagagcggtttctcttcaggtggagaagaggcaggaacagggataaagcagaggaagcacagcagaggcatcaaagggtgatttctacaaaagtgccattgagtaaagaggatgagattgaggctgcctggagcagggctgggtagactaataaagaaatcaaggaggacccctggtagagaatttggccaggaaataggtctggaaaagagaagactgatatagagtactctagttgtctattgcagattatttcaaaatatggtggcttaaaacaacaataaatagtgcttttttaaaaaaatcgatgctattcttgtttatattgattttaactaattaattacattttagaggtagggtctcactatgttgcccaggctggtctggaactcctggactcaagtgatcttcctacatcagcctccccaatagctgggactataagcacacaccactatgcctggctacatttctttttattttttatttttttgaaacagagtctccctctgtcacccggctggagtgcagtggcgtgatctcggctcactgcaacctctgcctccagggttcaagcgatttccctgcctcagcctcccaagtagctgggattataggcgcccgccaccacacccagctaatttttgtacttttagtagagacggggtttcaccatgttggccaggatggtctcaatctcctgaccttgtgatccgcccgcctcagcctctcaaagtgctgggattacaagcgtgagccaccgcacctggcctggctacatttcttatcttatacattctgtgggtctgttgagtcaacagcagctgagcttggtactcttggcttgaggtctcttgtgaggttccagtcaacaggtcagtcagggctgaaatcatctgaagacttgactggggctgtaggagctgtttccaagatggcacacacacagctggtgagctagtcatgactgttggcaggtggtttcagttccttcacatgtgtagcactccatagagctgcttgagtgtccttatgacatggcagctggcttccctcagacagagtgatcccagagccagtaagacagagctgcaatatcttttatgactcactgtcagaagttacacatcttatttcttttttttgagacaaagttttgctcttgttgcccaggctggagtgcaatggcgtgatctcagctcactgcaacctccgcctcccgggttcaagtgattctcctgcctcagcctcccaaagtgctgggattacaggtgtgagccactacgcctgaccttcacattttattgctacaacatcttattggatccacatgtcagccctatacagggctgggagggaatacataagggtatgaataccagaaagtgagtatcatgagggccattttggaggctggctacttaaaggagaaaattctttctcagtcactgccaagtataattatggaggttattccctgtacaaggaaacccagcagatggggcaagaaggggacttcaatccaggctgaacttgatgtctggccatgcccccagccaaagcaagtgggtataccccccactttttttttttttttttttttgagacacagtctcactctgtcaccaggctggagtgcaatggcacgatctctgctcactgcaacctccgcctcctgggttcaagcaattctcctgcctcagcctcccaagtagctgggaatacaggtgtgcaccaccactcccgagtaatttttgtatttttagtagaagtggggtatcaccatgttggccaggctggtctcgatctcttgaccttgtgatcagcctgcctcagcctcccaaagtgctgggattacaggtgtaagccaccttttaataatgtgcctctctagaagaggtacatgccctgttcttacaaagatgcagtttgtgcctcagccccactttttcaggatattttcaaatgcatgtaacagaaaacctaactttaaaaaaagaaaatataataatgtattgagtcatataattgaggggtgcagggggatagtgcttcaggtatggctgaacctagagtctcaaacaatgttgtgacctctctctttatctcacctctggtttcctctgatatgctctaactccatgtcaactttactctcctaaagctctcttattaccatggcacctagctgctctagtccttctgactctcaggttcagcccagatatgaagattcttccttgaggcatttggaataaaaagttctcagccccattctctttgactcctcccttgcacattcactgtggccaaggacatgaaatatgttgattggcttagtctatgatgtacagccacccctagaaaatagggctggctcaattctaacccaacaattttgaagatttcttctaaaggaatgagttggatactagtaaccaataaggaaagaaaggaagaaagaaagaaagagaaagaaagaaagaaggaaggaagggaaagaaagagagagagaaagagaaagaaggaaggaagaaagaaagaaagagaaagaaggaaggaaggaaggagaaagaaaagaaagaaagaaagaaagaaagaaagaaagaaagaaagaaagaaagaaagaaagaaagaaagaaagaaggaaagaaaagaaagagcaatgatcctggaagggcaaacatcacagtggttcaccatggcccagagtcagtcagcattcaaccgactctggagggagaagattcctccttgctatgctttgactgtcccctccaaaacacatgttgacatttaattgccagtgtaatggtattgggaggttggacctttaatgattagggcagagccctcatgaatgaattaatcctatcatgccagtggattagttatgggtttgttatttcgtgagtgggttcctaggataaataaaaggatgaagtttgacttccatttctctgtctgtcttgctcatgcttgcatgcccttctgccatgttatgacacagcatgaaggcactcgccaggtgccagtgccatgctcttggacttgccagcctccagaaccataagccaaataaacttctattgtttataaattgtagagtctgtggcattttcttatagcagcaggaaacaaactaagacagtgctagaatcttggggtggatgctggccatcagaagatggaccagagcagtgcctaggtccagagggaaagaagaatacctgtgactgttgccttaggtgtaatcagagggcttggctgtccctaggcttggtaggtgaagccccatatcatagacttgtgatccaagctatcaaccttttagaattaaaaagtagaattttgttttcaaattacttttctcaacagtagaagtaatgtataaattaaaggagaggatctaatcatttatcattcattcattattattatttttttttttaaagaggaagagtctcaccctgtcatccaggctggagtacagtggtacaatcatagctcactgcaacctcaaactcctggctcaagtgattctcctgccttagtttcccaagaagctaggactaaggcatgcgccactacacctggctaattattttattttattcttttagatacagggtctatgttgcccaggctggtcttgaactcctgggctcaagtgatcctcctgcctcagcctcccaaagtgctgggattataggtgtgggccaccagaactgggcatcatttatcagtcttcaaatatgtctggagcacttcccacatgccataatgtctcgtgatgaaacaatgtttttttaaaaaattgggaaatgaccagggcatggtggctcatgcctgtaatctagcactttaggaggctgaggcaggcggatcacctgaggttgggagtttgagaacagcctggccaacatggcgaaatcccatctctgctaaaaattcaaaaattagccgggcatggtggcaggtgcctgtaatcccagatactcaggaggctgaggcaggagaattgcttgaacccaggagacagaggttgcagtgagccaagatcacgacactgcactctagcctgggtgacagagcgagactccatctcaataaataaataattaaaatggggaagtgtaagtgcaaatccaggactggcttcttttagatttaactctcagtaaccattgctcatcgatatctactcccaggtttaagcagtactactctgactcttttcggagttgaagatccccctggttgtgcctgttttggcagttccaattcttggggtgaaagctgctttgcccattcctctgcttgagtctgggaaagcattttacaatcagcgtatctttctccagtggaggggcaaggggccttttcaattctactacctcaccattcttcagcattaaaaatctttgcaccgccaggcacagtggctcactcctgtaatccctgcactttgggaggctggggcgggtggatcacctgaggttgggagttcaagactagcgtgaccaacatggagaaaccccatctctactaaaaatacaaaattagccgggcatggtggtgcatgcctgtaatcccagctactcgggaggctgaggcaggagaattgcttgaacctgggaggtggaggttgccgtgagccaagaccgtgccattgcactccagcctgggtaacaagagtgaaactctgtctcaaaaacaaacaaaaaaactaattaaaaatctttgcatctcccttgcacagtaattcctgctttgcctatgtatttttgtgtcctgaggcagaaaagagagaggaaaacattgggcacccacaattccagttcaggctgggaagagaagacttctattagctagagtctgccaccagacccagctccctgctagcacactcaatggctccctccttcccctttaagggtccttatctgtatggtattaggttgacgcaaaaagaattgcggtttttgccatttcaaagtaatagtaactctatcaagaagaatttaagattctgctcatttctgcatttaaaaatctggctctgtgaaattttgcaggagaaatgggttctatttttaaaggggctgattctttctttcttctgatcattttcaagtgaaatttgaatgaaatagagcagttttgaaagctcagctgcatgatagattcttcctgagctgggtggagctgggttaatgtttcgcagaaagttgatcacttctattggtggtctgatggttcactcaataattg[138 bp omitted]atggagaaaccccatctctactgaaaatacaaaattggctgggtgtggtggtgcatgcctgtaatcccagctactcgggaggctgaggcaggagaatcgcttgaacccgggaggtggaagttgcggtgagccgagatcgtgtcattgcactccagcctggagaacaagagagaaactcccatctcaaaaaaataaaataaaataataaataaatgagttaaattgaatatttattttatgtatagtgaacttgtatgattcacgaatattattgctaggacaaagcgaaaatagatagctatgttagctcagacttgattgaaagaaacatgtcagtaaacaaaaatgctattggtacacagatacggcagaaatcatgaagatggctttgtttgtttcctgtggttctgtaataactcactacaaacttggtgacttaaaataacacatatttattttcttacagttctggaggccagaactttaaaatcagtttcactgggctggaattaaggtgctaacaggtctgtgttccttctgaaggctctaggggaggaccctttcccttgcctcttccagcttctctggaggctgcccacattctgtggcttgtggccccatcacttgaatctttccctccatggtcacatcaactcctctccttctgtgtgtatacaaatatatctctgcttccctgtttttttgtgcttcttttgtgtgtgtgtgtgtgtgtgtgtgtgttttgtttgtttttattttttttgagacagagtcttactctgtcacccaggctggagtgcagtggcacaatcttggctcactgcagccttcccctcctggcttcaagcaattcttgtgcctcagccacctgactagctgagattactacatgtatttttagtagagacggggtttc[132 bp omitted]ggcacttaggaccacctgaataatccgggataatcccccatctcaagatccttaatgcaatcacatctccgaagtctttttttttttttcttgtttattcttttgccaaacaaggtaacacattctcaggctccagggattgggacatgggcagcttttaggagggcactattcagcctaccacagtggcagaggaagtttggaaagcacagagcaggtgaagaaataagacttgtgttgccagaatccatatcccaaaggtctccagcgatcatcaaagaaaagagtctgctctctgcttctgcctccagctcactgaaga[136 bp omitted]tggtgaaaccccgtctctattaaaaatacaaaaattagctgggcgtggtggcacgcgtctgtagtcccagctacttgggaggctgaggcaagaggaatggcttgaaccctggaggtggaggttgcagtgagccgtgatcgcaccactgcactgcagcctgggtgacaaagcaagagtccatctcaaaaaaaaaaaaagaaagaaagaaaaagaaaaagaaaaaaaaggaccatgcactccaggcaggttcctgttgtccttgaagagtaaacacaaaaacacttgtccttgaagagtaaacacaaaaaaaatggatgcattcaccataaccttggattcttggacataatttgaatcactggtgcatacattggtgatacacacaccttagaaaacacgaattttaaattgccccgggttcaaaggaacattgttttactccatgcggatcactagcttaaggccccatttcagattcacactgtatttattgaaattgcttttgaaatgtgaatcaccaaatgttaataaacaaagtaattattcttgattttctttaagcattccatttattaaagggaactgatgctattcatgatttcatgaagaaacatgagatctgtaagtaggttaatgtgcttttctcatgaaattaacgaaggcattttcttattgcataataagtaaattagaaacgggattatcgcatttcagggaaaggtgctgtaataacttcttgctggatctgattagtgcattcacagtgagtagctttctcttggaagactttctggagggagggcttatcaactgaactcatgtaattcagcaagttgcgttaaagtgtgcaaatgaagtgagtgggagagaggaactaaatctcatatcagcatcagctttgatgacacccaggcttgctccccacccccacgtgcaccgcccaccctctgcacatctgcacaggcctgttgttgctctgacttcatggcaccagtgagtgatgtctcttttggccaagcagacaagaggagaccaaaggaaccagagagctccgggagacagggatgccagtctgcagctggtgaggagaggaagctggggggcagctcactctttctcagaacaatgtccggagaacctttgcagggaagctggttcaaggtgccccaaagttgtggcctgacaacctttctttaacatgctcctcctgggcctggctctgatcgacaacaaaggagcgcatcatttttgctcccggcttctgcttctcctgatctttgattcaaatcccagcatagggtctttttgctaaatggggtctttttaaataaaagatgcattgttagagaagctaggagggtttcatttctgtaatggggtctttagtcaaacacagagcagaccttctcaaggagaggggacaaagctatcagtggtcaggccccacaggctggggagagacagagagagacaaaaattctaatccaagtgggtgacagccaggaggggagggaaaccttgctggttttattcatgagagttttcactagtgaccaatagttagaagcaataaagaagggtgtcaggtctgaagggacatcaaattcagtgactttaaagttcccttctagtaccacgggtgtgaccctgtgcttttatggttcacttaggcattctttcctgggctgagctgtggagtagacagaacgcagtttcctgcataacacagccctgggttccaacgaaatcccaccactcacagctatgtggccttgggtttgtcatttctccaagtctgttgtccttgtctacaaaaacagagataccacctccctcctgagagcattagtaactatgagacagaggatactgggccatgtcttagcctgttcaagtctctgtcacaaaatgccacagactgagtaatttataaacaaaagatgtttctgtctcacattttggaggctggaagcccaggatcaaggtgccagtagactcagtgtctggtgagggcccatccctcatagaaggcaccttctgtgtttcctcatatggtgaggaaggcgaacaagctccttcaagtctcttttataaaggcaccaacctcattcacctcctaatcacctaatcacctcctaaaggccccacctcttaataccaacacattgagggttaggtttcaacacatgaattttggagaggcacaaacattcagatcatagtagtcccggtcgccaagtcccactattctttttttggtgttgtttttgtttttgggaaggagtcttgctctgttgcctgggaaggagtcttgctctgttgcctaggctggagtgcagtggcatgatctcagcccattgcaacctctgcctcctagattccagcaattctcctgcctcagcctctcgagtagctgggactacaggcatgcaccaccacgcctggctaatttttatatttgcagtaaagatggagtttcgacatgttggccaggctggtcttgaactcctgaccccagatgatctgcccacttctgcctcccaaagtggtaggattactggtgtgagccagtgcgcccacctccaagtccccctattcttgataagctgcctgtcctccaatgttggttaaggaaacagatattcagtcctccccagtgtgtgtgctgaagcttctggtcataaccccagcttgggccttcctgctcccttcctctcctcctggcctgttcctgcttggctattgcaggtggacgctgctcaagtgcatctggataccaagggtctgagaggcaggaatacaactagaggagccagaacaattccaacacagggagctcccaagagaaatcccaagggaagtccaaagagaagttgccatgtgggcctgagagtcttgggccactttgcttgtgcacctcccctcgccctgcagagcgactgagttcctggctgttggctcctaggggatgcagagttgcccaggtgtgatcagaggggaggaagccttgagctccccctagtggccgtggccgggcatgtaaaccagaggcccaggttgggggctgcgggccccacctcccacccccactccacgcaagactcttagggcctcatcatcagactttggagtccactttccaaatgtggcaccactcctttccacaaaaccaggggccacaaatgagagatttggtgcctctaatttatttggccagctccatgttaaagaaaaactttacttgccaatacataagcgttggatttgacataaaaatccagacatgtgatttctcttgcaaaatcagaagccctggcagatgaagcctcgctggcttgctcactgctcacctcctgttgcgtggccagcccagttcctaacaagccatggactggtactggtccggggccgagggttggggacccctgcagtagagggcaggggcagaggtggggaggccattaagaggctgttgttctgatgcaagtgagagattagggtgcgctggaccagggtggtgtttagtaatcatgattagaaatggttggtaccggccgggcacagtgtctcacgcctgtaatcccagtactttgggaggccaaggtgggctgatcacctgaggtcaggagtttgagaccagcctgaccaacatggagaaacccccatctctactaaaaacacaaaattagccgggcgtggtggcgcatgcctataatcccagctactcaggaggctgaggcaggagaatcgcttgaacccgggaggcggaggttgtggtgagccgagatcacgccatcacactccagcctaggccataagagcgaaactgtctggaaaaaaaaaagaaagaaagaaaaaacaaagaaagaaagaaaaaaaaaagaagtggttggtaccacagaattgaaccccctctcgtatataaaaagcatcttctgtctcccatttttcctcatttctgctctaactgaggctgagagtccctggttgtagccttgtagccccgtcaggctgtagcctgagccattttttctggaactgatgggtctccttcaactttaccttgctccacccaattcttcatggttagcgtgtggttctgcaatcccacggtgtcactcaccaggacccagaagaataccagtctgtacccaaaacatttagaagacacaagcaaatgctagaagaactcatcatcttgttacaatgacttctgtcattcaatcctgctactgagccaggcgcttgaaggtctctaggattttcttttctttcttttttttttttttttttttttgagatggagtcttactctgtcacccaggctggagtgcagtggcacaatctcggctcattgccacctccgcctcccaggctcaagcagttctcctgcctcagcctcccaagtagctggggctacaggcgcccgccgccacgcccggctaatttttttgtattttagtagagacgcggtttcaccctgtggcgcaggctggtcgcaaactcctgagctcaagcaatccgcctgcctcagcctcccaaagtgctgggattacaggtgtgagccaccgtgcccggccgaaggtctctaggattttctacatgctattatcttttcttggaatacatcttccctccacccaggtaactctagtcttagcttagacatggctctctccatagatcctttcttgacccagaagtttttgctgagggttgccaccaccagtcagaatgcagttccaaattcatcttatacaggtctgggactagggtgcaagctttcaggagccagttactctcagggtcatgcaagtgtaggggccacttgagagtgtctccttacattctacaccctaggagcctcctgcactccaccctagtcctggccctggctatgatccaagacatgcaggaacatcaagctcaggggctttgtgcccccagatgctttgccagtatggcgctgagttagattgtaccttgcgaggcactggcatggcatttggaagagagaagagcagaagaagccatcattatccagcagcactgaattcgcttggcagcaacattcatcattcccgagtcaccttcctgagctcacccatttcactggtgccactagctgctgagaatgtcatgagacccttcctcgggatgcccatgctctgtcatttcttgaagcagccctcctgactgccactttccaagcctctatttccctctaataaacgttttggtctcctaaatacctggagtggcatttactttccaggctgagccttgacagacacacttccccagtcccccatgagaaagagtaggcttcccatgagtcacgatttcagcatcttcaccagcacaggacatctgcctgtcagccagccctgtgcactctggctgctgatgcccaggccttcctggccttccttcagtgcccctgcctggcacataactcataactcttaatctccatccttaagtgggttcctcaggaaagctgtctctggctctgcccagccctctctgtgaccagctccatgccctcctaagcacttaacttagagcttcattattattattattactttttgagatggagtctccatctcttttgagatgaagtctcgctctgtcaccaggctggagtgcagtggcatgatctcggctcactgcaacctccacctcccaggttcaagtgattctcctgcctcagccgcccgagtagctgggggattacaggcgcctgccaccacacccggctaatttttgtacttttagtagagatggggttttgccatgttggccaggctggtcttgaactactgacctcagttgatcctcttgccttggcctcccaaagtgctggtattacaggtgtgagccactgtgcccggccagaaccccatggttttcttccttcctatagtttattcctgatatggtttggttgtgtctccacccaaatgtcaccttgaattggagtaatccccacgtgtcaaggtggggccaggtggagatagctgaatcatggggccagtttcccccacactgttcttgtgtagtggataagtctcatgagacctgatggttgttttttttttttttttttttttttttttgagatggagtcttgctctgttgcccaggctggagtgcagtggcgcgatcttggctcaccgcaagctcctcctcctgggttcaagcgattctcccgcctcagcctcccaagtagctgggactgcaggcgcccaccac[131 bp omitted]gttcccctgcacttgctctctcttgccggctgccttgtaagacctgcctttgcttctcctttgctctctgccatgattgtgaggcctcctcagccatgtggaactgtgagtccattaaacctctttcttttataaagtacccagtcttgggtatgtctttattagcagcataagaacagattaatacagtcctaacatataatatttctttgattattcaataatcagtggcacatctctttcagtaggtgataggatccatgaggacaggcagaattgcccactatggtatcccctgtgcctgattcagtacctggcactagtatgtgctcaatgagcaatttgtaaaatgaatcaataaataatttgttgcattgaattgcattaggttgtcagcacccatagagcacttctggtaatggtagctcaatgataggaactatgggagaggtaaaaaaaatgaataatcaataaacagataggaaaggttaagtcttgtgaaggcatgtattccaatatggccaccaagggctctcccatcctaggagcacttgttacaacgtaacctttacattccttccatcaagaggtgccgtctatgtccctttcctttgaaattaagtgagcttttgcacctgttttgaccaataaaatatagcagaaaggtcatagcaaacaatgccactgtccccttactttggaatactcccttctgaagtttgcggccatggaggcagtctggctgcccacaagtccgccatgctgtgaggaagctcaaactcccctagatagagaagccctgaacctacttgaagaaagatgtcctgccagtcttcagctgcttcaaccactgtctggttgcaattaaatgagaccactggccagaactgtccagatgagactgtcccaaattcctgacccacagaaacaatgacagatagtgaaatgacttttgttgcattaagccactgaatttgggggtgatttgttacacagcaagaaataactagaatagatttgaattcaaagaatgtatgatctagttagaggccgggcatgatggctcatgcttgtaatcccagtgctttgagaggccaaggtgggaggatcacttaagtccagagctcaagaccatcctggtcaatatagagagaccctgcctctatttttgaaaaaaaaattgagttggaaagtcaagacgtgagtgaatttaaccaagtttattggatggtgccagcagtctctggatggcaaaggtccaaattgtatggttctatctatgcgaataccataaatacactcacccatccatccccatcttctctctcccattcatctctatccatgctcccttacctctgcccctaatcttgccttggtccttcaaatccttggttcccatcatatgtctgcaattcactgcagggctgacactttctcaaactctcaacctgatagagccttaaattaataagctacctggtcttcccagcttcactttggatgtactgcagagtggagtcaagggtgtttagatcacaaacccctggttctggctcctggatcttgacaacagtcatcacataaattttctaacaagagacacatccgcataattaaaccaaagatatcacagacgcagacacatgcaaagagggcagggctgggagaagggaaccattcatcaaaacctcatcataaattcaagttgaaggactgaaaaggaacaaagcatggatacttcccaaacccagcagctggacctctcactgaaatcctgaaatcactgcagcccaactcaacatctgggagagaataaaatataataaagacttaaaaagaacagacgctgggcaattaccagttgaagtgcggatggggaatataaattctctgagcgcctaaagacagaaatatacattggcacatgggtcttagggctgtgaatttcatccagctgtagccaccattctttctcactatgactaatatttcgttagcaaatgcactttctaagcaatgaacataattatgttcaggttgacatgacctaaattagagtggctgaatttttatttattcgacatcagcagtgaagtaaaatgtccaaaaggattttgatgctgaatcaaagtaccaaagaatgttgggaataacattctatttagaattggaagatctgggtagaagtcctatctagtccatgtatacattgtgtgagactgggcaatattgaatctcctaaatgtggacacaaatttgaaatggagataaaacctacctccagagttttaatgaggattaaattaggtaatatatcttcaaaactcctgccacattgctttcggcttcttcacctgtaaaattggagcaatacttgcataagagggttaggttgtaaggattccttagcttatgatactaattaagatactcttggttgtaacagacagtgggatttatagttgctttaaaatataatgtattggctgagcacggtagctcatgcctgtaataccagcactttgggaggccaaggtgggcggatcacctgaggtcaggagttggagaccagcctggccaacatggtgaaatccagtccctaacacacacacacacacacacacacacacacacacacacacacacacacaaaattagctggggcatggtgtcacatgcctgtagtctcagctactcgggaggccgagtatgagaatctcttgaacctaggaggtagaggttgcagtgagccgaaatggcaccagtgcactccagcctaggcaacagagtaagactgtctcaaaataataataaagtaaaataaaatgtattgagttgttctagctaatgagaaagcagaaggtaagtgattccagggtaggatcaatgacatcagtgatgagtaatatcaaggcattgagtctaagtctctgcaacccatgtggctcctccctcatggtggcaagatggttgcatcagctccaagcatcaggtcttcacaccagagtgcccaaagcatgaaaggagaagagttttttccacacatctctcttatcaaggaggagaacattgctcccccgacacattttctgttacatctcattggccagaactgaaccatggcaattttttgctgggaaggagcctggggaaataaatacccagcatttccaaaagctagcatgaagagccacctctagcagcagggaaaaagggggagaaaaatgacattggggtgggaaacacactgggtctgcccctgtaatggatgtggagtgtctaccgtgatgggccccatggtcaatggagtaacattcattgagcaccagctgtgtgccagctatggtttgtagacctttagagggatcacctcatttcatcctctcaacaatccttgagaaagtactactattagccttgttttatttttttgagactgagtttcgctctcgttgcccaggctggagtgcagtggtgtgatctcggctcactgcaacctccgcctcccaggttcaagcgattctcctgcctcagcctcccgagtagatgggattacaggcatgcaccaccacagccagctaattttgtatttttggtagagacggggtttctccttgttggtctcaaacgtctgacctcaggtgatccacctgccttggcctcccgaagtgttgggattacaggcatgagccaccgcacccagccagccttgttttatagacaaggaaattgaggcacagaaaatttcatccactttagctcaaggctatgcaactagtgagttggcacaaagatatccacacctgagtcagagcaggttgagtcttcaaactaggtcaaaggtggatgcctatctcacttctcaggtcttgtttgttctgattctcacctcgaactcaagtggatttgagtttctacctgtgtatcttagtgatgagtatgtttgtgaaacatttccataaagtcatgagatctcctaaactgttcctaaatttatttacacgttcatattgtgatgattgttgtggagtggaggcctcaaggctcaggcttacctggaccacaaggtcagtgacctgggcccatatcaggactgatttgtgcccatcactttccatggggtctgacagattttctccagagaggcgggtggtaagctgtggtcacaaccagggtttatcttatgctttgttaactgggcagggaggctactggaaggaagtccccaagtatggaccgcagggcacttgggagagaatacgagcctggcacaaggagctgggctcagccacacggcctgaaggttttgggtgtggcttgttggctgttacttggccctgtccctgaggaacagaagcactttgactgtgacctcagggccaagggagtagagcagtgaggagagggggaccttcctaaacctccctggagaacaaaagcaacctcagcacttcggcgcagagcagagcagacctgggacgatgcctggagcaaagcagctgctggtgcccattggagtgtcccagagcttggggagaaacagtgcaaggtgcacaaccagctgtggacaaaagtctcttctcaacctcctactgtgtgccaggctctggctggcatggtccgt[136 bp omitted]ctcagg[131 bp omitted]atggtgggggaagtgcagggtatgaagagcgcctccaggagggccaggcatctaactgggcttggggaagattctggaagtgtcttattagagcatgcctaacctttcataccagttttctacagtgcttctgctgtctcatatttccctaccgcatgccaacctccatggggcagccagatttgtcatcctgaagcagagttttctcaacctgattttttccatgattact[131 bp omitted]ctgtctcagcctcccgagtaactgggactataggcgcccgccaccatgactggctaattttttttttttttttttttttagtggagacagggtttcaccatgttggtcacgctggtctcgaactcctgacctcaggtgatccatccgcctcagcctcccaaagtgctgggattacaggtttgagccactgcactcggccacatcagtgaaattttaataccacagagatattgtatgtctgtttgcttattgtacatacatctgtgctttatacacgaaaagtacaattttttacttcccaagaaccaatttctgtccctttggtggcaatatttccccccactgagaatgtagttttctaaaagaataagcccaattttcttagtccattcctgctgctataacataatacttcagattgggtaatttataaataatataaatttgtttctcagagttctggaggctgggaagtctagggtcaaggtgccagcaggcattgctttgggccaggtgtggtggctcacgcccgtaatcccaacactttgggaggcgaggcaggtggatcacctgaggtcaggagttcaagaccagcctggccaacatggtgaaaccccgtcttcactaaaaacacaaaaattagccgggcggtggtggcccatgcttgtaatcccagctactcaggaggctgaggcaagagaatcacttgagcccagaggcagaggttgcagtgagccgagatcatgccattccactccagcgtgggtgacaagagcaaaactccgtttcaaaaaaaaaaaaaaaatgtgccagctgatttggtgtctggtgaaggcttgctctctgcttccaagactgtgccttgctgagtccttacttagcaggagggcaaaaggggtacaattaggatccctccttttacaagagcactaaatcgcttcccataggcctcttagtaccagcactttgcgggttaagttccaacatatgaagtttagggagatgcaaatattcggactctggtagctatgctcttcgtgtaaagccattaaatcatttctgaggcatgtttagttgatccatttaatctggtggctgtggtggtgtcgcagtgacatggctagctggaaagttacagcatggatgaagggtacacctaatggaagcctgtaagtcaatggttggatcagttctctatcatttcataacaattaccctgaagcttagtagcacacacatcatctcttttctgtgggtgaagaaccttagtatggtttagttgggtgctcatgctcagggtgtctcacaggttgcaattgaggtgtccgtcagttcaactggggagggtctgtctgctttcaaggtcaccccgtggtagttggcagagctcagttccttataggtgagtggactaaggacctcagttagttgctgactgttgtcttcaggctgtcctcagtccctccttcacatatgagccttcccgtggggcagctggcaacatagcaacttgcttcatcagtgtgaatgagagtggggagagaatggagagaaagagagatagggatggggaaagcagcagagggagagaaggagagagggaatttgaccaagacagaagtcacagtctttagaagcaaggcactctggagaggcgattgcacaaggtgtgaatagcaagaggcaggatcatcactgagagcctttcagaagctgcctaccatgatggtcaagccaaagtcaggaaacacacaagtcacaaaaaccattggtggtctaggttgggtggatgatcaacaattgggcaggcagccaggacctgtccttaaggcaaatccatgggccaagagcagaaaggtggcatggaatcagtggtcaacaggagtccgaattccaagcaaggcactgagtcaagtcaaggaggataccaaggactctgggagcaatccctggccaagcagcccaggcaacagagatgagttacagtggtaggaagattctttttatttatttatttatttttattttttgagatggagtcttgctctgtcgcccaggctggagtgcagtggcccgatctcggctcactgcaagctccactgcctgggttcacaccattctcctgccttagcctcccgagtagctgggactacaggcgcccgccaccacgccaaggtaatttttttttgcatttttagtagagaaggggtttcaccatgttagccaggatggtctcaatctcctgacctcgtgatccaccctcacctcggcctcccaaagtgctaagattacaggcgtgagccaccatgcctggtggaagattctaaagctaggtaatggctttgtcagccaggaagccaattccctgataaaaactgcccccagaccctggtagttctagggcctggaggtgagagcagtgatcttctttaggaagctgtgagaattgagcatcctagagacagagctcagagcaaatggggaagcagcacagggaagattctagaaacagacaggtgggctttgaatgccagcccagctactcactagttgtgtggtgttaggtgagtaaattgactctaaacctgagttttctgttctctgaataatcctcaattcatagtaaggctgacaaagatggaataggatactaaaatcttagtacagtgtctgctacagagcaagcattcaataaatgtttattattgctataattcttattatataaaggtaatatatttaggggaaaaacaatgcaaaccttaaaatcaaaataacaccatcaacaagagcctaatattctctgattgagaagatgccaattcaaaatttaacccaatttcttatttactaataaagggtggcaggcagtatgggaatcacaattgctgaagggctatttcatgtcaggcattgctctaggtgccttgtaaagctaacttcatgccatcctttcaaccagcatgcaaaagtggagttggtattcccatgttatagacgaagcaacagagactcagaaaagttgagtgagttgctgaaggtcacacagttaataggagatagaagtggacatttgatacaggccagttggattccaaatcccaaggccatcgatcctattttatgttaacatggttgggtggagatgttaaccagagcctacacagcttactcatgacatagggaggagctgaagagtgagtccaggttgcagaatatgtgacaagaggagccaaggaatcagtcaactcccaagggcaaaagaatgatgttttcattcattaccattcaggaaagaaaacatatttctccttaggaaatcagagtcagaatccaagatagtgaagaaccaacacaataatattttggaccttattaataggtatcagttctttaatatttgagtttcccctgggaaggaataatctctcctccagtgcattttcacccatgaacagacctaattttacgtctagtatccagaaggcttctgggcttctaaagaggtttccaccctggatggacaattctctaacactattttttagctaccacagctcgatcaaaatactctctgtggatgtatatatactaaagatcactgccaattgtagccataacagtcaagtttcttagttgcagaaaagtttgagcagaaagggatttacagctgggtgcagtggctcacacttgtaatcccagccctttgggaggctgaagagggtggatcacatgaggtcaggagttcaagaccagcctggccaacatgatgaaatcctgtctctactaaaaatacagaaattaactgggcttggtggtacacgcctgtaatcccagctactcaggaggctgaagcaggagaattgcttgaacccgggaggcagaggttgcagtgagctgagattgcaccactgcactccagcctaggtgacagagtaagactccatctcaaaaaaaaaaaaaaaaaaaaagggatttactaccagatattgtattattttcaatatttccggggagactggagaaccaagcttggatgtcacgtggccaggaacaatgcagcccgccaaccatgtcatagcacttttctggttttaaattctgtattggaagatgtttgggactgagtgcagtggctcactcctataatcccagcaacttgggaggccaagaagggtgaattacttaagctcaggagttcgagaccagctgaggcaacatgatgaaacctcgtctctataaaaaatagaaaaattagctgggcgttctgacgtgcagctgtagtcccaggtacttgggaggctgaggtgggaggatcgcttgattctgggaggtggaagttgcagtgagccaagatcatgcctgggtgacagagtaagaccttgtctgaaaaaaaaaaaaaaagtgcctggaatttgcttcaaaagaatatggaaatggagagtaggggtacagatgaaaataaattgacacaagttaataattattgaagctaaaacaggtgcacgaggtttcttttcactggtctattttgttaaaataaatttattgagatataacttaatgagtacagcggacatttagtgctacactaaaagcccagactttatcactatgcagtatatccgtgtaacaaaattgctcttgtattccttaaaattttacaaataagattttaaaaggggaaagagaaaaacagatttgttgagatataatgtatatgctctaaaatttactcattttaaactgtacaattcaatggtttttagtatatttacagaatcgagtaaccatcaccacaatctaaatttggaacatttttatcaccccccaaaaggaaccccatacccattagcagtatgggtattcccattctgccattcccattccttctcattccagccaagggaaaactgtaatctactttctgtccctataaatttgcttatttgggatatttcttataaatggaaacttacaatatgtggtctttcatgactggcttctctcacttaacacgtgttctaggtccatccatgttgtagtgtgtattagtaggtcattctttttgactgttgtgtgataaatacattcagttgtatgtatgtcacattttgtttatccactaattagctggcaggcatttggattgtttccacttttttggctattatgaataatggtgctaggaacattcatgtataaatgtttgtatggacacttattttaatttttcttgaatattcctaggagtggaattgctgcgtcgtatggtaactttatgtttcacatttggaggaactaccagattggtttccaaaatggctgcaccattttgtacattcttaccagtaatgtatgaaggttccagtttctccacattcttaccaacagttgttatactcttattaaatttttatttttttatatggtaaaatacgtactactttaacatgtactactttaacctttttttttttttgagatggagtcttgctctgttgcccaggctggagtcagtggcaccatcttggctcactgcaaccttcacctcctgggttcaagcaattctcatgcctcagcttcctgagtagctgggattacacgtgtgtgccaccatgcccggctaatttttgtagttttagtagagacagggtttcaccatgttggccaggctggtcttgagctcctatcctcaagtgacctgcctgcctcggcttcctgcaccctgtctattttagccattttaattgtgcaactcagtggcattaagtacattcacaatattgtttgtataacaatcactactctctatttctagtactttttcattgctccaaatagaaacactgtacgctttatacaataactcctcattctcctttctccccactccctctactttctgtctctatgaatttgcctactctaggtactgcagatatgtgtaatcatataatctttgtcctcttgtgtctagcttctttcacttagcataatgttttcaaggttcacccatgttgcagcatgtatcaagatttcattctttttcatgattgaataatattccacattacctatataacacatgttactcattcatctgctgatggacacaagttgttttccccttttggctattgtgaataataccattatgaacattggtgcaaaatatctgtttgagttcctgctttcaattcttttgggtatatacccagaagtgggattgctggatcacatggtaattctatgtttaactttctgaggagacgccaaactgttttccacagcagctgcaccgttttacattcccacgagcaacgcacaggagttccaatttctccacatccttgccaatacttgttatttttgattctagccatcctagtgggtgtgaagtggtatcttattgtggttttgatttgcattttcctgatggctaatgatgttgaggatcttttcatgtgcttattagccatttgtataccttcttcagaaaaatgtcaattcaaatcctttgcacatttgaaagtgatttttaaaaaatcttctaatttgagttgtaatacttttttatctattctgaatgcaagtctcttatcaggtatataatttgcatatgtcgtcttttcactttcttgatggtattgtttgaagcacaaacgtttttaatcttgttgaaggccagtttattttttcctctattgcttatgcttttggtgtcttatctaagaaatcattgcttacaccaatgttgtgaagatatactgttatgttttcttctaagaattttatagttttagcacgtataaaaaggtctgtgatctattatgagttaatttttgtgcataatgtaagggtcctaactaattcttttccgcatagatattaatctatctatgtttgtgtatggtgaggcttcccgtaataaaaccttaagaaaaggcaggctgagcatggtggctcacgcctgtaatcacaacagtttgggaggccaaggtgggtggatcgtttgaggtcaggaatttaaaaccagcttggccaacatgataaaaccccgcctctattaaaaacacaaaaattagctgggcttggtggtggatgcctgcagtcccagctactcgggaggccgaggcaggagaatcacttgaacctgggaggcaaggtggcagtgagcagagatcgcaccactgcactccagcctgggcaacagagcgagactttgtctcaaaggaaaaaaaaaaaaaaaaaaaaagaaagaaagaaaagaaaagaaaaggcattgaaaaaaagttacatactaggtaggaactgcttttcattgctaatgacttctacctaaataagagtgtttttagcactcttacgtttggtttttaaatttattcactttaagtaaaagaagttcagaagtaggcagagctgatacggccattctattctatctataattgttattgacccagaatcctactatctgtttgttgcaacattcctacatgtggcatctatcctcaaggttaccatggtcacaatgtagtagctggagcaccagcaacacctttgcattctgagcaggaagaagaaaagttaaaaaaaaaaaaaaaaagccgggggttggggagcggtgagaaggagagtcatccctttgaacaacttttccccgaagcta[140 bp omitted]ctgcctcagcctcctgagtagctgggactacaggcgcccgccaccat[175 bp omitted]tattcccgtagtagggaggctgggtacattaacatattcatcagtacaagggtcctaacattaaattaaatgaggatgcatggtggatatcaagtagccaaggcagctggctgtggtgcagggtgccacttggccacccactaccgatttttagtcctcttagtggcaaataggattgtgggattagatgagccaagtattgctagagcttccaagttctagagacttgaattctacatttaatataaactctccagatttttcaatgctggtaaccaatccaaaaaaacaaaagtttaaccttgtctgggccaaacacagtacttctgtggcccgtgttccacctcgtgctgcctggtgacatcctctgcttttgggtgaacattagagctcttgagacacctgaagggcccaggagtggtattacaattcccctgtgtggctccgagccagtgggtagaagtcacgaggaagtagatcttggctcaactttaggaagaactctatctgcagagctgtcaaaaacagaaggagctgcctggggaggtaggaagctctctgttgctagaggtgtttgagcagatgccagagaagaacttggcaatgatttctaaggtcctcccaaccccaagagtctctgaggctataagaaaattactgtgatgactactgctgcttcgatgactcactgaaaggaggatcctgcaggaggcaaatggaggatgagacgccacacatctggattgttaaggagctagcaacccaccagctgtggtgtcctaccctgcaaatgacaaggcaaagggaaatgggaaatgccctcaccgtggggatgacctctattcaacgtagcctgtagggtagcaaagagttctttcccaaatatttacaagcacgatttgattcatctccatgcactgcatagggatacacaacagatacgtagcttttcttatgcaggatgattcaggttactaaactacactcctttatttactcctgctttcagggctggctttctggtatgcgacctgtgcaggtgtagagggccctgcatgcagaaggacctgatgcttggtgtaatgctccgctgttaccatcttaaaattctcagttttgaaaaaggggtctcatattttcatttttccctggcccctgcagttatgcagtgggtactccacacttttactcaaaatgtattcagtgtagaaaatgcgaagcactgggggccgggcccactctgtcacccgagctggagtgcaatggtgtgatctcagctcacggcaacctctgtctcccaggctaaaacaatcctcccgcctcagcctcctgagtagctgggaccatggtcgcgtgccagcgtgccagcatgcccagctaatttttgtctattttgtagagatggggtttcactatgttgtccaggctagtcttgaactccaaggctcaagccttccgcctgcctcagcctcccaaagtgctgggattacaggcatgagaaaatttatatctttcaggccactgcattatgggagtttttcgttagcctacttgaccaaatacaataaacaaacaggagttaattaagcgaaaaaaaggaagagaaggcagactccaaagtgcccagtccagggagaacgtggcatattcagggaactgggaatggttcaagatgcttgacactctggctgcgggagggagagtggtgacttagtcagctcaggctgctataacaaaacaccatagaccggggaacttaaacaacagacatttatttctctctctctcttttttttttttttttgagacaaagtcttgctctcctgcccaggctggagtgcagtggcgtgatcttggctcactgcaacttccacctcccaggttcaagtgattctcttgcctcagcctcccaagtagtttggaccacaggcacctgccaccacacctggccaatttttgtatttttagtagagatggggtttcg[134 bp omitted]aagatcaaggtgcagacagattttgttcttgatgagggccttcttcctggcttgcagatggctgccttcctgctatgttctcacatggtggagagagggatggagggtgaagggagggaggggaggggagggaggggtctgttgtctcttcttctttttatgagggcactaatctcatcttgaggatccccacccccactccaaataccattacattgtgatttaggacttggaacacatgaattttgggaggacacagacattcagtccataacatgtgggccatgtcaccaagaaccttggatgccaggcatggagcctggatatcatccactggactgtgggaaatcaagtcgggcactgacatcctttttgttttgccagcttgggttgcaacctgtgctaaggtttgctatggtttacatatttgtctcctccaaacctcatgttgaaatttgatccctattttggagatggtacctaatgggaagtgcttggatcatggggtttggtgccattcttgaggtagtgagttctcggtctcatgagattgcacttggggaggggggtgtgttatgaagccaggatgcccttcaggtttagtttctcttcttaaacgtctgcttccgctttgaccttctctgccacattttaactcagcacagaagcactctccagaagccaagcagatgccgacaccatgtctcttgtacaacctgcagaagtggaagctgaataaacctacttctttagaaattattctgctttgggtattccctacacaaaatggactaagacaagctgcagattttaaaatgtatgaaatgtttcataagactggctaataatacaatgagcgctcatgcacccaccacctagcttgaaaaacacattgcagataaagtctccagcatttctttcctgatcccatcttcagctgagttttttttttttaatttttttttatttagacaaagtctcgctctgtcactaggccagagtgcaggggcactatctcagctcactgcaacctctgcctcccgggttcaagcgattctcctgcctcagcctcccaagtaactgggactacaggcgcatgccaccacgcccagctaattttcatatttttagtagagatagggtttcatcatgttggccaggatggtttcgatctcctgacctcgtgatccgcccaccttggcctcccaaagtgctgcgattataggtgtgagccactgcgcctggccacttctgctgagtttttaactttattttgttttgctctgttttgtttgtttgtttcttttttcctttcttttctttcttttttttttgagatggagtgtcgctctgtcgctctgtctcccaggctggagtgcagtgacgcaatttcagctcactgcaacctccgactcctgggttcaaatgattttcctgcctcagcctcccaagtagctgggactacaggtgccagccaccatgcccagctaatttttgtattttcagtagagacggggttttgccaagttggccaggctggtctcgaactcctgacctcaggtgatccacccgccttggtctcccaaagtgctggggttacaggcatgagccaccacgcccagcctgtttgtttgtttcttaagggcacttggaaagggcaaagtggaaacaggacatacatcattgaacctctcatatgtcctcaatattttgccaggtactgtgatgtatacatatggaagaagcagccacagccaggtagaaaacaacaacaacaacaacaacaacaaaaccccaacctttgtgctttcccagaatgcattgactctttcctgagaccagctggggcatgctcagaggggcaccatgtttctggatgtgaggtgatggaatatttgcactgagtctctagccattacccacttctgctgactcatgtgcggataaatggcacagtccaaataaatttgaaatatgtgtctggaagttttaaagttctgagaaggacattgaaggatttggggccgttccatcttttcatctggctgatggctgcgactttggggagaagagaaaagatgttgggagtgagcagctggtgagcaaaagatgttgatggtgttggtgaggatttcatttcctgggccagagcccaagatgctagagtacaaggctactggcaaaacacagagagtaccgcaaagtcggggaagaatgtgctgggcagattacccaatgacatcaaaggacacttaaaagatttctgtgggctacatagtaaacagctgttgtttttgtctgctcagcattcttttgccatcttcttttaataacctctttatttctgaaggaaaaccaggcattttcatagtctatgcagctgaagagggtcgacacatcctttggcttcatgggtgaatatgcaacttggtaagagtctatcaaaatctcagtgatttattcagaggtggacacgtgactcagcctggaccaatgagagttttctctgggactttgctcaaatgattaggaatgagatatgctttcttagagttgttacgatgatagctagcgtgagaccgagctcgaatgagactgagaatgaaatgaatacagcagaaagctgagtctaatgatggagagacagaaattcctgaaaacattagggcacttggatttagccatgtctgaagctaaccgtacctcttggactttttagttatgtgaatctatacctttaaattctctctctcccatcaatctggtttaatgtaatttcagtttggttactgtaatgtacaatgatagttgagaaaatgtaaaacagtctttgtgattagaaagaaacaggatgagtcaggcgcggtggcttatgcccgtaatctcagcactttgggaggccgagtcgggtggatcacttgaggtcaggagttcgagaccagcctggccaacatggtgaaaccccatctccactaaaaatacaaaaaattagctaggtgtggtggtgggtgcctgtaggtcccagctactcgggaggctgaggcaggagaattgcttgaaccggggaggcagaggttgcagtgagcccagatcatgctactacattccagccttggcaacaagagcaaaactctgtgaaagaaagaaagagaaagaagaaagaaaggaagaaagaaaggaaggaaggaagaaggaaagaaagaaagaaagaggaaaagaaaaaaaagaaaagaaagatacagtgcccagttattcttgggcaaaaataaaggcaacaggatgggaactttatttatggtcttacacatccatctcccagtgcaaagggtgtgggggaaatggataaggtaagatgttcatactactgaaagaagaagaaagctataatttcattagcatcattgctacttaggaggggaatcataactggaaagtgacaatggaaggatgtattttatttgaaagatgcaagtccaatagaaagggaatattgtatagcattatctgtgaggaagttactaagtggtctgcctgtcagtatggaaagctttggggtcaggaatagggaggacaaccacagaaacaagactccacccaacatggggccagaggaagcctggagaagatgctttcctaacacacatccccaagccatgaaagagtttcattaggaattccagttatgcagacataagctggaattcttcttttgctaaagtttagaacatctgataaattattatcttactttgctaacagtttctcagaacacggaagtagcaatggagtaagctgttctgttttcctttcttttaaaaactatatttttcccttgaacataaaagaaagacatacttctggtggaagattcgataatacagtggtgacactcatacatctattcctcaaagataagcaattggatttgtactgtgtgccggatgttggctaagtatttaataaataggctcatttaatctctacagcattaagaggtgcattcttgtatgatccttagtttgtggataagaagactgaggtttagtaaagctaaaaaaaaattctctgagatcacagagccaagttggtgctagagccaggatttgaactaagccatctgggctcttaaccactatactacattctgtatttgtgcttccacctacataaattccttgttatagtgtatatttataattttgtagcctgtttttccctttcacttaattttataatataggcaatttcccattttgtcaaaaactcttaaattttaaaaattaaaatatttatacttatgtaaagtagactactctaagggatgcctatggacctatcacagcttcaacaattaccaaacagtcttgtttcctctatccactcctcactctattatctaaagcaaattgcagacattgtaccattttatctgtaaatatatcaatatgtaattttagttattccttaatattctgaggtatccaatctgtgctcgaactttccagatgtaaacattattgtaaatgttattctaaatttggttctgaggatacttacggaagaattggtgggtgatgtggaagtattagaagctttgagccaaagtgaccctgtcactttggagtttgcagtagcaaacaaacagaaaacgctgcactgcacaatgaggaaaccagatttccagaagttcagtagaaagaaagatgtacaattccacctagaactgtattgttccacgtagtggcaccagtcatatgtcactatttacatcaaaactaatgaaaattaaataacatttaaaattcagtccctaaataaccacatgtggcttgtggctatcatattagatagtggagatataagatattttattttattttattctgtcttttttctttttttgagacagggtctcgttctgtcgcccacgctggagtgcagtggcatgatcatggttcaatgtagcctcgacttcctggggctcaagcaatcctcccacctcagcctcctgagtatatgggactacacaggcatgcaccaccatgcctggctaattttgtttattttttatagagatgagatctcactgtgttgcccaggctggccccaaactcctggactcaagtaattctcctgcttctgcctcccaaagtgctaggattacaggcatgagccaccatgcctggctgatataagatattttcaccatcacaaaaagttccattgaatgtagctggtctagactttaagaaggaatagtatttgcaagaggcaggagattcctacacaaaaaatgtctgcatttgtgattgtcaaagggcttgaggagtgcagctgccactctgatcacagaggcctctgatcagcttagcattcaagaggaggtggagcacacagctcaagtctcattgcttatttatttatttaactgctttaattgaacaggccccacttagccatgtgccaacaagaagtttgcgttatttttgtaactcacttcctttttgctaaaaaatcccttttcacactcagcagcggaaaaactgaagttagcccagtcttataaataccagccctgtccagtcatttccagtttaaaatagtttcatttcgagtaaacatttcacgccgttcaggtatttttatcctccaccactgtctggttcagaaccccactccgagcttgggcatcagaggagagctttgtcctttgctgtctcttctcttcctccttgcagcccctcaatagctgctccaagtgtcccctagtgggaagtggagaagggagacctctcctttcttggccaggccacgtttctctatctgactgggtcctcagtgttatttggttgcttgattggctctacctaggtgatgtcccaggtaggattctgctgtgatgtcatgctcagtataagtcgtggcccaggtgatgtgtctctgtccaaggtcctaagcccagtggaccttcaaaggctagtggccacgttttcagagccgcagccactctaactcccatcaagcaattccctttcttactcaactggcgtaactatcctgagttacccaactttacctagttcatggtggaaacttcataggcccccttctatgatgttccagaggatgcggtatgatacttgttgtgcccagatgtgccaccccacaactgctcacacaagcttcatgctgggctccactatagttgagttgacaactattaatatgtactttaagaaaatgaaggagtatgtgctctgggtttcagactctcttctacctcataggcacttcccttggagttctccaattttgagggacaggtcaagggtccccgtagcacatgattgacgatataattacttcagaaggaatcttgctccctctcaaagatgagcccttatcccttcttgtcctctcttctttttccttatctcttcctggtgctaaaagcaactaacccagtttagatgtgtattttggtatctatttttgaaaggccaaattactccaagacgtagccacttaaaacaacttttattatctctcacagattctgaggatctggaatttgggtgtggccaacccgagtggttctagctcaggtctcttatgtggtcacagtcaggatctcagctgggactgcattatctgaaggcttgactgaggctggagaatccacttccaagatggctcactgacatggcggttggcgggaggctccattccttaccacatggacatttccctagggctgttcacaacgtggtagctggcttcccccagagcgactgatctgacagggagaggacaataaaaatggaagtcagagtgggtttagtgcggggttgactgtattttttaatctagttctggagaaaagatgctattttttacagtttttttgattttggcttccttctaacatttccttttatccttgaatttttactaaataatttcctcctgatttaaaattttttttctcttctgggaatttgaaatcttggtacttactattacattaatttttccaaagagttgaaatcattttaatgccagaacatggtaaatttgcagccatttcaagcagctggtggtcttttttataacatcattaatgggtactattaaatattctgagaggtgaatgtaaaatataaaaggtataagtttttttttttaaataaaacaataagccttcaaagagaaaacaaacaaaaacaaaaaaaaaccctagtctcataagtgacataccatcacttctgccttgctgggctggtctcaccgaccatctggatgcaacatggaaggggttacacagggggatgggggatggataacaggaggtggggatccttgagggccatggaggctggctaccacaaggaggttcatagattgtgggaatctaacctgggagtagagatcctttttagctttgttgtttagaatttagccaagctgttttcagtgagcatgagcttttccagggaagacccagaaagggtctgagtctttgctcttgtatttataaaagcacattttctttttactatcacacaagtcatatgtatgaattgtagaaaaagaaaataatagagaaaagtaaaaagcaaaaggaagtaatccgtgtagtccaccattcaaaagtaagctctgacaacattttggtgtatatttttacagaattctctatgttcattcataaatgctaattgcaattatttatttatttttatttttatagagatgaagtcttgttatgttgcccgggctggactcaaactccgagggccaagtgatcctcccaactcagcctcttgattgctgggactataaaaattttccaccacacctggcattaacaactatttattgaacatctcttatgtgtcagtaatgctacttccaagaacttacttaaggaaatattcaaggccatgggaaaacgtctacaaccactttatcccaatgtgtttactcaataaccttgatgtcattttatctttgtttgtagttcagccttaaaactatttttctttatggttcctggctcacaaaatttttatctaaatctaatattacataaattaattttaagaagtaggaatttaaaatttttttccttgcagacagaaaatgtataattatggctattctcttctatagctacacttttcatcactgttttttctgtttgtttcttttctttgaatattagaagaatttttcaagtagggctcctatgcatgaatctttatcttttttttgttttgttttttgtttttgagatggagtcttgctctgtcacccaggctggagtgcaatggtgcaatctcggcttgctgcagcctctgcctcccgggttccagcgattctcctgcctcagcctcctaggtagctgggattacaggcgcacgccaccacgtccggctcatttttgtattttttagtagagatggggtttcaccatgttggccaggctggtcttgaactcttgacctcaggtgatccgcctgccttggcccccaaaaatgttgggattacaggtgtgagccaccgtgcccggccgaatctttatctttaaaaaactttgccaggtgcagtggctcatgtccatagtcccagcactttgaaaggccaaggtgggcagactgctcgagctcaggagttggagaccagcctgggcaacatggtgaaatcctgtgtacacacacacacacacacacacacacacacacacacatacacgcacacaagctgagtttggtgctccatgcctgtaatcccagctatttgggaggctgaagtgggaggatcgcttgagcccagggggttgaggctgcagtgagccatgatggtaccactgcactccagcgtgggtaacagagtgagaacctgtctcaaaaaaaatttttttaaatgcttttctcaaggtttaattaaataattaaaatacacaaaataatatttataacatatgtataaggaataagctaccattatcagcttaaaaaatcaaacacttccagcatcttagaagccttctcttcctttctggtgattactatcctgagttttgtgcttatcatcctcttgcatttcttgatatatatgaacacacatatggcctgtgtatccttataaaataccttgtttgtttgtttgtttattgagatggagtctttctgtgcacccaggctggagtgcagtggtgcagtctcagctcactacaacctccgcctcccgggttcaggtgattctcttgcctcagctcccaagtagctgggattacagatgcctgccaccacacccagctaatttttgtatttttagtagagacagattttcaccacgttggccaggctggtcccgaactcctgacctcaggtgatctacctgcctctgcctcccaaagtgctgggattacaggtgtgagccaccacgcctggccttttcttttggatatatgcacagtagtgggattgctggattatatggtagttccatttttagctttttgagaaagctccttactgttttccgtaatagctgtactaatttacattcccaccaacagtgcataaacgttcccttttctctatctcctcatcagcatttgttattttttgtctttttcataatagccatcctaactagagcgatatatgatcttactgtggttttgacttgcatttccctgatgattagtgatgtttagttatgcaaagttttcccttctgtaaataacatcaatttgtatatgctctcctgtgaattgccccccaccccaattatgtttgtgagagtcatccttattgatgggcatgggtgcagttaattcctttttgttttcttttgagatggagtctcgccctattgtccaagctggagtgcaatggcgcgatctcggctcactgcaacctccgtctcctgggttcaagtgattctcctgcctcagctcctgagtacctgggattacaggcatgcaccaacacgcccggctaatttttttttttttttgtatttttagtagagatggggtt[132 bp omitted]tttcattgtataaatgcaccacattgtgtcagttctgtccatggatattaagacatttctgagttccagcaattacgaacaatacttctgtaaacattctagaagatgttatctggtgcacacatgcaaagatttctctagagcagtcattgccaaattggctgcacattggaatgatgtgaggatcttcaaaaactattgacaggtggttcacacccccaggacattctgatttaattggttcagagtctaactttggtgtttggattttatttgatttttttcaaacacatttatttttttcagagacagagtcttgctatgttgcccaggctggtctcaaacttctggactcaagtgatcctcctgccttggcctcccaaattgttaggattacaggcatgatccactgcaccgggccaagtctggattttaaaaagcatgggattggccaggcgcagtggctcacgcctgtaaacccagcactttgggagactgaggagggtggatcacctgaggtcaggagttcaagaccagtctgaccaacatggagaaaccccatctctactaaaaatacaaaattagccaggcgtgatggtgcatgcctgtaatcccaactactcaggaggctgaggcaggagaattgattgaacctgggaggtggaggtttcagtgagccgagatcgtgccattgcactccagcctgggcaacaagaacgaaactctgcctcaaacaaaaacaaaaacaaaaacaaatgaaaaccatcaaaaagtgggcaaaggatatgaacagacatttctcaaaagacgacacttatgcggccaagagacatatgaaaaaaagctcatcatcactggtcattagagaaatgcaaatcaaaaccacaatgagataccatctcatgtcagttagaatggcgatcattaaaaagtcaggaaacaacagatgctggagaggatgtggagaaataggaacgcttttacaccattggtaggagtgtaaattagttcagccattgtggaagacagtgtggcaattcctcaaggatctggaaccagaaataccatttgacccagcaatcccattactgggtatatacccaaaggattataaatcattctactaaaaagacacatgcacacgtatatacacatgcacatgaaatataaagacacatgcacccaaaggattataaatcattctactataaagacacatgcatgcatacgtttattgcagcactgttcacaatagcaaagacttggaaccaacctgaatgcccatcagtgatagactggataaagaaaatgtggcacatatacaccatggaatactatgcagccataaaaaaggatgaatccatgtcctttgcagggatgtggatgaagctggaaaccatcattctcagcaaactaacacaggaacagaaaaccaaacactgcatgttctcactcataagtgagagttgaacaatgagaacatatggacacagggaggggaacatcacacactggggcctattgagggatggggagctaggggagggatagcagtaagagaaatacctaatgtagatgacgggttgatggatgcagcaaaccaccatggcacttgtatacctatgtaacaaacctgcacgctctgcacatgtattccagaactttaagtataacaataaaaaaaaaagaaagaaaaaaagcatgggaatctggccacacgcattggctcatgcctgtaatcccagcactttgggaggccaaggcgaggcaggcagatcacctgaggtcaggagttcaaaaccagcctggtcaacatggtgaaacactgtctctacaaaaatacaaaaattagccagccatgatggctggttcctgtaatcccagctactcgggaggctgaggtaggagaatcacttgaacccgggaggcggaggttgcagtgaaccgagatcatgccattgcactccagcctgggagacagagcaagactgtctcggggggaggaaaaaaaacaaccaaccatcatgggatgctaacattcaacaatatttggacccactgccctagggtgtctgtctgggagtggaattgcgtggccatagggtatgtgcattttcagttgtagtggatattgccaaattgtttcccacaacaaatgtgcaagagttccagctgtctcaggtcctcaccaatataaggtattgtctgatcgtatttttttttggcagcatcaattctaccctttataagggaattacgaattttaatctgcttttgtttttagtttccttataacccttctttattacccttttaatgctactttcatttatctaagcctgccgctttttcatctgagtttgttttctcctaatgattttatgtttcagaaaggccatgtcttttggtgccctatgcaaaaaagtttcctgacatgttcttattgatctgacaatggatggtttccagtgctttgctctttctctgcgtcccaatcacgcatctttttctttctgtatttttttatagatctcatgatggttttgttctcttaattcactcatgcacaaaatatgatctgatatttatcaacaggtagaaggcaaattgcctgtgaatagtcctgtgccttcttagtctacagctgaagtgaagtttgacaagcacagatcgtggtctacctccttcattaaaacaggttctcctttccttttcgatccgccatctgcagtggagccgccaccaaaatgcagattttcgtgaaaacccttacggggaagacaaccaccctcaaggttgaaccgttggatacgatagaaaatgtaaaggccgagatccaggataaggaaggaattcctcctgatcagcaaagaccgatctttgctggcaagcaactggaagatggatgtactttgtctggctacaatattcaaaaagagtctactcttcattttgtgttgagactgcgtggtggtgctaagtaaaggaagaagaagtcttacaccactcccaagaagaataagcacaagagaaagaaggttaagctggctgtcctgaaatatcataaggtggttgagaatggaaaaattagttgccttcgtcgtgggtgcccttctgatgaatgtggtgttggagtgtttacagcaagccactttgacggacattattgtggcaaatgttgtctgacttactgcgtcaacaaaccagaagacaagtaattgtatgagttaataaaagacatgaactaaaaaaacaaaaaaaacaaaaatcaggctcacctgggattctattgctccatgatgtagcatcttcttgcagccaccagttaagatcataggctttgggggaagggtcagatttaactgactcagcaccacgtctgcctgcattaatagtggggtgggagtaagttaaagaatcaggggtgttttctgaaaaacagagatgataatagggcctcaggattaactgcacagaaagggcttagcgtaatatctggcagatggcaaacatttaataagtggtagctgtcatcattattattttattattagtatattattaacatattgtatgtttgtgtatgtattattgacacatagtattattactgttcaccccactgcattgtaagctacaatgaaagtaggggttcttctctattttgttcgtttctttatcctcagcaattagaacagtgcatgacacatggtagacattcaagaaatatttgttgaatgaagaaagttttgagaatttggagaggttatagtaggaattgctaaccaattcaaaatgtgccattttgaatcagaagttggcagtgttatttataatagtgacccatttgaatcaacctgcatgtcaaatgtcagggattagctgaataaatcacagtacttcataagctggaagctatgtccccattgcaaaccatcttgtggaatacattttgacagaggaaaatatttacttatacagttggaattttaaaagggaggagttataaaacaatatgtatagtatcatcccaaatatataaaaaagtatgtatatgtataaaaaaacctggaagtagtataacaaaatattcataacgattgtctctggtggtgaggttaaagatgattttaaatttgcttctttgagccttcttttattttccaaatatgtttgtagtaagcatatattattcttgaaataagaaaaaataacatatatattttaacagacatgtactaaagatgcattaagtggcataaatcccagggatgcaaaacaacagtgcaaatctagaagagaaaggaaagactcaaggatggtttaggtttcaagggaagttttaaaagacaacaaaacgagtcctgaatcagccagcattcttagttgcacgcaacagaaactaactggctgatttcagcagcaagggaatctatttagagagtacaggggtagctcacagaattgccaggagggctggaggacccatgtcaacagctacccagccagaaacaatgccccaaatcccaccacagaactgacccagcttccaccactgacactgggtacagcagcaactctgctgtcctgggagcctggtcttgcccctgccacaatcgtcaccagagatgtgactctactgaaagggtattcctccactcagcagcctcagcatcacctggaagagtcttagacatgcgcattctcacgccccttccctgacctactgaatcagactctggggtgggacctagcaacctgcacttcaacaagactttaaggtgattgcaaagggcacccaggctggaaaggcactgcttcataatcactgatgattctttgcatcatcagttatcactttgcatcattcacagttcaagaggacgctggacacggtggctcatgcctgtaatcccagcactttgggaagccaaggggggtggctcacttgaggtcaggagttcaagaccagcctgaccaacacggtgaagccctgtctctactaaaaatacaaaaattagtcaggtgttgtggtgggtgcctataatcccagctactagggaggctgaggcagaaggattgtttgaacccaggagctggaggttgcagtgagctaagattgtgctactgcactccagcctgggcaacagagcaagattctatctcaaaaaacaaacaaacaaacaaaaaacacacatacaaatagcaaagaacaaaacaaaacaaaaaacacaaagtccaagaggaatgtgtcttgattgacagatcctaagtcatgtgtcttaccgccttggggcaagagaggctgggaaagattatcaacagtgaaaagcttccacagtgagaggcaggcactgctttaccgggacttatgggaatgaggattctcaagacatacagatcgagttgagatgctgatccacaaaaaggaatgactagtgggtcataggaatgacaattccagggtatggagcaattaaagaggcaaagggttttggccaaatcaattcaacaactatttccagactgattaaagaatgaaaagtacaatgataacttttaaaatgtttaagagaaaacacagaagactatctttttttttttttttttttgagacggagtttcgctcttgtcgcccaggctgtagtgcaatggcacgatctcggctcactgcaacctctgcctcccaggttcaagcgattctcctgcctcagcctctcaagtagttgggattatagatacctgccaccacgaccagctattttttttttttttttgtatttttagtagagatggggttttaccatgttgggcaggttggtcttgaactcctgacctcaggcgatctgcccacctcagcctcccaaagtgctgggattacaggcatgagccacggcgcctggtctagaagactatcttttttacaccaaggtagtgaaggatttcgtaaatcagcttcaaagagcatacactataaaggaaaaaacctggtaattttgattaccttaaacattaaatctttattatgttaaaaaacaccataaataaagtaaaaagacaagccaaaggttgggagaatatacttgtgtcccttatagctaacaaaagattagtgtctcgaatatttattaaaattctataaattaataagaaggagaaaaacaacccaatacaaaaagtctgaagatgttgttttagttatttgttgctgcatacaaaattaccccaaaacttaagcatctttctctctcttttttcttttttggagacaagatcttgttctgttgcccaggctggaatgaagtggcatgatcaaatctcactgcagccttgacctcctgggctcaagtgatcctcctaccacagtctctcgagtagctgggaccacaggtgcatgcaaccacgcctggctaatttaaaaagaatttttattttttagagatgggatctcactatgttggccaggctagtcttaaactcctgagctcaagtgatccatctgccttggtctcctaaactgcttgggctataggcatgaaccaccgtgcccagccaaaatacaacatctttaaacaattatttgttatctcacagtagttcagaaatttggcagtaccttatctgggtagctctagtgtctctcaagaggttgttacccaagctgtcactgggtctgtgagtcacctttatttgcattattcacagtattacacttatcttaaaatcaattattgctataggataagggcagctgggttgacaagatctcctgtgaaaattctaggagtcttagccttttataacctgttgatgggagtttaaattggtttctggagggtaatttggtataaatacaatcaaaagcttcataacaaaacacatcttttgacctagcaagtctatctctcagttattaagaaatcatcagacaaatatatgtaaaaatatgtatagaatgtttatccaatcattgtttatagtagcaaaaatgaaataaagcatgcaaaacccataaataacccacatgtctctccagagggtgcaaaatatacaacatgca[136 bp omitted]tggtgaaaccccgtctctactaaaaattcaaaaaattagccaggcatggtggcaggcacctgtagtcccagctactcgggaggctgaggcaggagaatgtcatgaacccgggaggtggagctggcagtgagccgagatcgcaccactgcactctagcctgggtgacagagcgagagtccatctcaaaaaaaaaaaaaaaaaaaaaaaagaaaagacactataataagcatagaaaatggtctggaaggtttcaaaataatatgttcatagtaaataccattggagattgggttgtaagagttttctatttgtcttttgtttatttagattttctaattttcttttcttttttttttttttttgagacggagtctcactctgttgcctaggctggaatgcagcggcacaatctcggctcactgcaacctccgcctcccgggttcaagcgattctcctgccttagcctcctgagtagctgggattacaggtgtgcaccaccacgcccggctaatttttgtattttttagtagagacggggtttcgccatgttggtcaggctggcctcgaactcctgacctcaggtgatccacccgcctcagcctcccaaagtgctgggattatgggtgtaagccaccacactcgtccctagattttctaattttctacaaagattatgtgttgcttacatgatgaagcagcgatggatttagaaaaatgagttttagttgataatacatttcatctaatccagcaatgtaataatgttgatgctaaaaagtgatcatttatgacattaggagactggaagaagtgatgatcccattacactcttcatatgctcctaataggaatcacattttaagggttcagaggagagaccccaggatgttgttggatttgaaaactatgttctacaagtaactgttgagaaatcatgatgatttatgtttttaaaaggagataattaaggaaaagtactctgtcttcaaatgtcccaatggcagtcttatgaagactattgacaaagagctgctctagcaaaaagtcccagaataaactgctggaaatcccgtggaggaagagttcattatgatataggaaacaactttctaactactcggcactgttactattgccattatgagttaaatatcttagggttctttggttgcaaacaatagaaatagactccagttaacatattcaggaaaacaattattcaaggataatttgaattattctataatttggagcagctcatagaggggacttgggtttggaaaatcacagaagcaaaagacgtctaggattccagatagaaggaacaagtaaatgggatgtttctgttggcaaaaattagccctacttctcttcaaaaggtcttgacataactgcacccaacgtccaaagttaacggagtaagagtgtgatgaacctggcttggccgagggaaggcaggactacttcattgacagtccctataagattttgtttttagacggagtctcactctgtcgtccaggctggagtggagtggtgcgatctcagttcaccgcaacctccgcctcccaggttcaagctattctctggcctcagcctcccaattagctgggattacaggcacctgccaccatgcacagctaattttttg[155 bp omitted]tcatttcagagagagagcaaaagtgaatgagagagctgcttctataagatggagaatgaattctggagccagaaacaacacatgccaacacattgccacttcactctgccaggccgaccgtttgcttcatcactgaaggacttcagcagaggctgaatggtcaaggattgataactccttgcctaggctgctgtggggagatccccatgttagactggtggggattgtggggaaggaggtgtagactaaatgagttctgtggttcctcagtaacagtcagcccaatattccatctctgagtcatacttagtgtgttttgtgaaaaccagtggcagttttcacccaagattaaaggtgtgccccctagaactccccagtgtcctctttaacaccaaatatggttccagtacccatgaattaaacaaacctttcatgaactcatctatatttttatactctacctcttctgggtaatgagatccatcagtttatgaatcctagagaccattatcatgcaaatgagtcattctatttcttagtcccccctcctccccccaattctgcttctaaccattcacagatgtccgctgactgtctttgttttgggacttggtgatcaagtttatgtttgccctggaaactttaaacatttaaaaacattatcttgctgctcactctctccaactcaggtttattaggctgtggaatgaactttcatgggaaacagtgagcaaatgattatggaatggagtgttttctttacaaaggagaggttttctttcccctgattattgcaccatgtagttaggacaaaacttgggtgcaaggaaacaatcacagaataaggagtcaagagggaaaaagaaccaatattaaactcccactatgttctaggcattatgctgggccctggtgtcgtcaggattcctagtcacaagcacagaaaatgactgaagctgattaaagcagaaaaaatcctcacccgttttaaggctattggggtagttcatagatttctcaggaagattggataaccaggtggagcaaataggcaggaacaaaatggtgctctacagtcagagaacagcaaaaatcacgccacagaactggttcagtaaaagaaaaaaagatagcactagaaaccaaactgtgcgctcagtccagacctctcaggcctggacactggacactaaggctggcaccactgccactctggccatgaaactgcatgttactgtcactgctaacaccacctggttcttctttccttgctccaattcccctctccacgctcattcaaggctgaggagcatgtacatatgattgactgagtctaggtgacctggccatgcctcagcttcaagggaggctgggagaggagtagccagggttttccacttggaagagggctctgtctctctcagttggacagccaaaaaaaccaccaaaattccacattagcacttgccatatttccctaattcagcaaccccataagtaggtatttcccctgttttatagatgagtaaattaaggtttggtgggctgagtagttggattagatcatacagtgagtaagtgactgaacaatggctaaaactggtctccttccttatcatttcatgatgtcttgtctatgccaggttctatgttcacccctcaacataagaacctatgagctaagcattattatactcatttcactaatgaggaaatgagaatttaccccgggttctcagctcataaggcatggaaaacaggtggcataacatgagtcagccctttaaccacagcactatattggctcttcaggaaagagggatgttgggtgaagcctctttcgcagtctttgtctggcaggccttggggggcatgccaagtgttttagtatgttctcacactgctaatgaagacatacttaagactgggtaatttgtaaaggaaagaggtttgattaactcacagttccacatggctggggaggcctcataatcatggtggaaggcaaggaggagcaaagtcacatcttacatggtggcaggcaagagagagcttgtgcaggggaactcccacttataaaaccatcagatctaggggccgggtgcagtg[131 bp omitted]tggtggtgggtgcctgtagtcccagctgctcaggagactgaggcaggagaatggtgtgaacccaggaggtggagcttgcagtgagcagagatcgtgccacagcactccagcctgggctgtctaaaaaaaaaaaaaccatcagaccttgtgagacttattcactaccatgagaacagtatgggggaaactgactccaaaattcaattatctcctgccgggtccctcccacaacacatgggaattatgggagctaaaattcacgatgagatttgggcggggacacaaccaaaccgtatcaccaagtgaccacccagacacctacctcaggcaacagaacactaagcactttgacacccaaggttggaagctttgagcattctcaactcctggctcttccacatcagataagttgcaagttgtttttccctcttcgtgcccacagccacatctctggtctgggttttattactttatgccagtgatctgcactgtcttctcagttcatctccttgcctcctgtcttctccttgagtatagccatggccaatggctttgtcttgtcccaggactgtgtgcctaatgagactgggtggcgacgggagagtggtgtctcctgggtggatgcatcagaatttagttgtgcctggatgtgttactggaatgaccattttacaaccatccaagaataagccaatagtaagtgtcgtgaaaggagcatgcgtattagaggggttgattatgctgtgcctgcagcctgcctccccatcaacttccagttaggtgagacaatatgcgttcttatggtttgtgattgagtttctactatttgcagcagagagcattgccactgctagtcatttagctgaaatacaaatccaatcattttcctcctctgtggttttgtattgtctttggaatcaagctcacattccttaatacagttcacaaagctcccgatgggctcatggtttactggtcaggcgtggttctcagtatctgctgtctacccttttccccaaggaacttcaggtcgtcatcagacaatcctgcttccttttccccatacacacctgcatatctatgttctttctttcctagaacattcttttcctccttctccatctactatacttctactcatctttcaagtttagctcaactgacaatccttccacaaattttttcctaatccctccaggcagaattaaggaatctcttaagcgtttctgagcactttgtgtctgtgttatggtgctttctgcagcctcatacacaatcacaggccacctatgtttctgcctctttgctaaaacatgagccccttaaagacaacgactatgttccatccaccttctagcttagtgcctgtgccttgtaccggacaaaatgatcctgtaagtactaatgaaatgttcatgaattcgttcagattgcaggtaacttagcatgtgcttattaactgttatttatttttattacaaataaagcagtattattgtcagtaataatgtctttaggattttgcagttcatgaagctctttactatacgctatctcaattaacacagtatttatttttaaatacttatttatgtatttatttactttgagacaggatcctgctctgttgcccattctggagtgcagtggcaccatcacggctcactgcaatctctgcctcccaggctcaagtgatcctcccacctcagcctcccaggtagttgggactacaagtgcatgccaccatgcctggctaatttgttatttttgtacagatgaggtctcactatattgcccaggctggtctcaaagtcctaggctcaagccatttgcccactttggcctcctactgggattacaggcatgagccgtcatgcccagccccacaatatctctataacaccaacgttgtccccacttcccagatgaggaaactaggcacccagttaatgtatgtatattggttggatgcctataatttgcataatactgggcaagaagccagctgtgaaggaagcttgcaaagaagtaaaaaccagagtctcccttctcacagtgtttacaatttacttgcggaggtaagaaatcatgcagaatatttccattaaaagagacaagagcactggaaaataacagtgaaga[138 bp omitted]cggtgaaacctcgtctttactaaaaatacaaaaaattagccaggcgtggtggcaggcgcctgtagtcccagctactcgggaggctgaggcaagagaatggcgtgaacttgggag[131 bp omitted]aattaagatggaacactatggtctgacagtggaggtccatgaagagtcttccaaaagagagcccagcttggattttaaggattagtgggatttcacaaaatgaagaagtgggcaaggcattccatgtgaaaagtgaagtcttaacagggtgcaactccttctctgctaagcaaggaagaagataggatagtgaaagccccaaggaaatgaatggatatatttgtggcatggatagatggatagatggatggataaatggatggatgagtagatggatggatagatgggtggaaagacaggtggataggaggatgagtagatgcgtggatggatgaacagaggagtaaattcacagcttgtagaggatggcgctcattttaccaaaattgtctccaaacacagcagcatcatgatgaattgtattctctttacagaacagcttggtttaacttgtccagatgaaagaaaggcattgtagaaatccataaacacttgttgaattaaaacatttgaatgtggtcagagctacagagaaatgcctgggcttaggatgcaatcaggccagtgtggcctttcgacattatgtgtgggtgtgttttctcacaaacacatgtgaagagacacaaacaaaactttgtctgaggtttttattttcctttttactgtgagatgccaaacttctgttttgactggattgtcactttccaacttttcatgtgtgggagcccaaagccccatgagttggcatgaatgagacactttgactcataatgatggtggaggcaactgttcatgtgactgggataaaagatgttattcagctggtcagggaaatgatcacacttgatgggaaagtgaactttattcctcaatcccattcttatatctcatgaaattgtatcctgagtcaacggtcttatgtgatcaagatgagatgtgagttgagttggtcttcctctagcttttttttttttttccttttgagacaaagtcttgctctgtcggccatgctggagtgcagtggcatgatctcggctcactacaacctccacctcccaggttcaagcaattctcctgcctcagcctcctgagtagctgtgattacaggtgcccaccaccacgcctggctaatttttgtatttttagtagagatggggtttcaccctgttggccaggctggtctcgaactcctgacctcaaatgatccacttgccttggcctcccaaagtgctggggttacaggtgtgagccaccatgcctggcctctagcttttaatttttaacaactaatgagtcacattaacataatacttctgccttactccacaatataacccatcatctgtgttccctgaatttctggctgtgttgcagagcctgcagccatgcatctgaacacagaggcttttcctacagttgggagtttccagcctagactttttcccaagactggcctaattctggtctaactcacgatgtttggactcagcctaaaatgtgccaatttttaaaagcttttaaaaaatttcccagcctaagatggcttgcgcaatcttcagcttgatgtcttgtggttctctgtgagggcttttctggcagacactgtttgttacctacacaacccatttctgacccgcttctttatcttgctacctctgcttgtggaaggaggaaatccaagtacagaatttcccaatctcccttgggctagatgtggtcatgtgacctgactcaggccagtgagaagaggaggtctacttggggcttctgggaacatgttttttccttatgtaggagataaattgagatgttacctttctcttctttttcccatctggaatgcagaggtaatgtctaaaggtacagcagtcaccctgtggccatgatgctgcaagtatgtggaaggaaagccaaaacactaagaatggaagagtagaaaggtaaaaagatgcaggctgggctgtgcatgatggctgatgtctgtaattccagtactttgggagactgagggggaagattgcttgagttcaggagtttgaggcgagctgggcaacatggtgagcccctgcctgtacaacaaaattttaaaaattagccgggtatggtggtgtgtgcctttagtctgagctactcaggaggctgaggcagggggattgcttgagaccaggagcttgaggctatagtgagctacttcagcctgggcaacacagcaggaccctgtcaaaaaaaaaagaaaaaaagaaagaggaacaaacgaacgaaagaaagaagggaggaaggaaggaaggaaggaaaggaaggaaggaaggaaagagggaagaaaggaaggaaggaagaaaggaagaaagaaagaaaagaaaa[144 bp omitted]gaaaccccttctctactaaaaattctaaattacctgggtgtggtggcacatgcctgtaatcccaattacttgggaggctgaggcaggagactcacttgaacccgggaggcagagtttgctgtgaaccaagattgagccattgcactccagcctgggtaacaagagtgaaactctgtctcaaaaaaaaagaaagaaaaaagaaaaaatgtgccaagatgacatagttgggctgctcaggcaaacggagaccactttcaataaatgtccacacggtttaaaacttcgttgttgagttctctgatacttgcagctgaatacatcctaactggtacggtctgccagtgtttggctgaaggatgctgtgaagaacaaggtgagaatatggatctgactttggatagagccaagtatgggaaaccagaaatgggggaatgggttgatgaaaggattcatcttgccgtattcctacttgagttttcctttttatttttttgaaacaggctttcagtcctgttgcccaggctggagtgcagtggcgcgatctcggctcactgcaacctctgcctcctgggctcaagcaattctcctgcctcagcctcccaagtggctgggattacaggcacatgtcactgcacccaactaatttttgtattttttgtaaagatggggtttctccgtgttgcccaggcttgtctcgaactcctgggctcaagcgatccgctcaccttgaccttccaaagtgctgggattacaggtgggagctatcatgcctggccaagttttcttaatttcttctaccctccatatgcctcttggtttaagttttttttgtttgtttgtttgtttttggagacaaggttttgctttgttgctcaggctggagtacactagtgcaatcacagctcgctgcagccttgaactcctgggctcaagggatcttccctcctcagcctcttggatagctgggactatataggtgtgcaccaccacacatggctaattaattttttttttttttttggggaggcagagtcccactatgttgcccagcctggtcttgaactccagacctcaagtgatcttcctgcctccacttcccaaagtgctaggattacagatgtgagccaccacacctggccttggcttaagttttaatgcattaactctctttataggaaattcaagatattgttgtggcaaagatcccacatatgcctatatcagtagtaagttaaaaatgatttacccctagaataaagctccataagggcatggattttttgctgttttgttcagttatttagccccaaattccagaatagtgcttagcacatggtagatggtcattaaatatttgttgaataagtgaattattgagactttgtctcaagacgcccttagtttgaaaggcagaaagtttggcaaatgaatatctatgatgtttataatctggccatattgctttgattgtggactgtactctgctttgcctaaaatcctttttaataatagtcttaagttttgtcatgtcaatatataccttaaaaatagttgaaaaatcaccagttttagggagcagtttagaaaaaaatgactgttcccttgtgaaattccagccatgcttctgaaaagaggaagttctactggaccttgagattagtccaggaaagggagagtctaatttagggatattttgaggacagagtcctgaatagcccatgtggatagcttcctctgttttattttaattgtacgctcagtgtaatgtgcttagtctttacctgtctggtctgaaagtacccttccagccttcctcagcctccctctctgcacttcggttacatgcctgaaaagccctttcccacttctcatctaaccgtctccaagtcagccctcaattcctagcttggcctttcccagttcccccaggtggggatcgttgctgtaatcctggagatcctacagtctctcattcctgcctctctgtagaagcttgtcaggctgcctcacctgctggaattacgtgtttcccatttctcccctctagtacacactggatttgtggtgaataatgatggccgtagatcacatttatagaaaattcacctcatgccggacacagttctaggtgctttacatgtattaactcatttactcttcccaataaccccaaggtagatactactgagaaccccattttacagaagaggatttaacacattctgcaaatatttattgagtggctactatatgcttggcactgtcccagccgggtactagggatgtaatttttttgttgtcggtgttttttttttttttttttttgagatagagtctcactctgtcactcagggtggagtgcagtggcataatcttggctcactgcaacctccacctcccgggttcaagcgattctcgtgcctcagcctcccgagtggctgggattacaggtgcccaccaccacgcctggaaaatttttgtatttttagtagacatggggtttcgccatgttggtcaggctagtctgaaactcctgacctcaggtgatgcttgtctcgaactcctaacctcagatgatgctggtattacaggcgtgggccaccgcgcccggcctagggatgtaacgttgaacaagactggaagaaggataaagtcaacaaagtaaacaaattgatgaatcgatatttatagaaattgggcaggtctgatacatcagaaaggaactttttaggtctgaggagtgagaatggatcctcccacaaggtgctactattaaaataaccacagataagggaggttgaagatgaaagattcataccaggaaacttcacaaaacccaccaggcagagatcaatgttaaccatgaaaggaaggacaaaagcaggaagaggcgaactgaaagagcgacagggggttggagaagcacaagtccaaggtgcagggagagaaaagggaggctcaagaaaagccttacaacatggccatggcagaaagaggagctgatggtaatgaaagggattcttacaagtgcctggaaataggctggcactgatcttacaggctgaggcttaaaaaggttttgttcttctgtcggataaggagagccattgtggtccccaggaaataaggagttcttgggtgcgtgtatatgtgtgcgactgagtggggagggggaattccttgccccaaatgcagaatgattgtcagtgtccactctattccttgcacctgcctgagtggaggagctgcaactgcccccacagggacctgcgtgaggaagccgggcctgggggtggggatcatgggaggtaggcttggccctgcctcacggtaaatgactacctgtgagccagcctagcacgcaggatctgcagctgggcatggagctcctgctttgggtccccagagccaacgtggtggaggtgtggatgtgacagggaggaagaaagaggactgactgcagcccccaatacctgccccaagagcctctgagtaggagaacgggtggcctctggaccacagctgccctgatggagcccctgtgactcctaaagccgtgtagatcctaaggtctgacccaggtagcctctggagagggaccagggaccctttgggagggctgcagagaacaccagcccaggattttctgctttccttgccatccctgctactagtgaggcagtacagtgaagtgctccggaaccccatccccgggggagagtctggctctttccctctctacagtgtggctttggataaattttaacccctgtctctgcatctacaaaatgggtacaatagtatctcccttacaggattgtagtggggtgaaaagcttaggaaggtgtggagagccgagtaggcactcaataaacataaatagtggtagttatgagtattatttttgcctctggggattgtttggtacgtgaagggcacatgctctttggaatacaccatttccccttatccctgagtttcagggacaaccacaattttttggtacaggatgaagtccaggagcaaaccttgaagttccaggcctcttagttgccacttccttcctcttttgtccttcgtggcagtaaataaccctggggtaataattgccaggagttgtgcctggaaacaaacaagctcactttgacagggctctgcagaaattagaatagctgaatgacattagtttaggtgatctgggcgtctgctgcccacctcctcccagtttgctctttattataggcagatatggtagtagttagctgagcccctgaccccatgacactctcgctgccttctagattctgctatgccagggcagcctccccactcctcactttttctctgctcattgctcatttgggctctccaggggaggcaggggcggggagatgatttgcataacatctgaaaatagaattttggcagcttttgtcagatgccagggttcttgggaagggcatggatactgaagaggaaaaaacaaaaggaagtattctgggaattctgtttgttcttggcaccagacaggaattctagttcactaagaagatttttctctgcatcccgaaccccttcagcccatccttcacctttctctgaacacattcctgaactttctgaatgcctggggctattttgagtctgaagcaagcccttatgggtcctggtggttcccttgggttcacctcaggagagagagaatctttacagaggaggtgagctcagagtgtgtctgaatcttccgtggagtgtgttgacagccagagccttctgggaaccagggcatgagggattccactaaaccttggcttggacgttctttctcacctgtatcctttggccttgacctttttttttttttttttttttttttgcgacagcatctcactctgtcacccaggctggagtgcagtgacaggataacggctcacagcagctttgacctcccaagctcaagtcagcctcttgagtaattgggaccacaggtacgcaccaccatgcc[141 bp omitted]aaaccccgtctctacttaaaatacaaaaaattagccgggcgtggtggtgggcgactttagtaccagctacttgggaggc[144 bp omitted]tgttgtgcaggctggtctcaaactcctggacgcaagtgatcctcctgcctcagcctcccaaagtacttggaaacggcacctagctggccttgacttctgctacctaaggttatgctgggggagtctgacggaatgctatttctgtggctttgtagaccacttcatttattcatttgttaattaattcattcactcatttatttattttaccctaaaataatcacatgaaaaacgttttgtgtgtatgtgtttgcttgtgtgcacaactgcttatggggaaggtgtctacagctttcatggggttgacaaaggtgtccctgaccccaaagagtaaaaaaaaaaacaaaagcaaacaaaaacaaacaaagaaacccccacctgtatggaggggtaagaagattgaattagcatttgttgaggccattctgtgccaggggctatactaaatttttgtgtgtttttttgtttgtttgttttggagggagcgtaacttttttaaatgaagtaatacaaaaaaatcactgtaggaaatttgaaaaaataatgagaataatatagaaaagattaatctgtaatccaaccacacaaagagctcttcagccattgtggatctgttatcttcaaactgtcttcctgtaaaactggacacttcacacttctacaactccctgacatggtgcttattcctaagtcatagaagactgtgaggctgaagccacgcccctcacaccaggaggcacgcagccttagctatcaaggatagcttttagccggtgaagaatacacttagctaccagagtaaggcaagttctaggattgaggaatacaggactgaggttgacaaaggagcaggagggagtcttgaagggacttctccaaaaaggtaataatttggcaggtcttgaagacccagcctgagttgtttaatggttatagtttcagttttacatgatgaaaagagttctggcgatggatgatgggttatttcaaataatgaaagttctggaaatggagttggtggacgggaaagcgggaattactgagatacggtttgggtacacggggtgccaatgaggcaggaacaggcactgcatctcgtcgaagcttgatcccacctcgaaactgacactattctgccaccatggaatagctgttaatgtattttggaatttcttttaccaatgtaattcccttcatatatttattgcttcttcttctggggatatcaactttacatggtataaaattgactttggaatttgctcgggaagaaatctggcttgcactcgctttttttttttttcttttcaattacgtgattgtttttagccccacttgtagctagctttaccactctaaataatacacttaccctctgctgcgtgtgttatccaactttagatggtatcaatgaactttcccttctggaggatgagaagatcagtgctgtcactcatctttcgcctctcttctgccccctccaccttaactcctgacatctgtccactggatgctcagttttagcctgtcagagtttataatatttatagtctgttctgtaactgaaactgtgattttaaaaaaacagtgataaaatatacataacataaaatgtgctgaatttcctgtcttaaccttttttttttttttttttttttttgagatggggtcttgctctgtcacccaggctggaatgcaatggtgcgatctcggctcactgcaacctccacctcccgggttcaagtgattcttctgcctcagcctcctgaatagctgagatttcaagtgcctgccaccatgcccagctaatttttgtatttttagttaaggcagggtttcaccatgttggccgggctgttctcgaactcctgacctcaagcgacgacctgcttcggtttcctaaagttctgggataacaggcatgagccaccacgcccgtccatcttaacatttttttaaatgtacagttcagtgttaagttttcacattgttgtacagccatcaccaccattcagctccagaactcttgtaaaacagaaaccttgtaaccattaaacaattcaggccaggtccagtgactcacgcctgtaatccaagcactttgggaggctgagatgggaggctggagtgcaatagtgggatcacagcttactataatctcgacctcccgagctcaagtgatcctcctatctcagcctcccaagtagctgggaccacaggcatgcacctctatgcctggctaatttctgagcccagaagttcaagaccagtctgggcaacacagggagaccccgcatctcaaaaaaaaaaaaattagccaggtatagtggtgcatgcctgtagtcccagctactcaggaggctaaggtaggaggatcacttgacccaagaggtcaaggctgtagtgagctatgattgcatcactgcactccagcctgggtgacaaagtgagaccatgtctcaaaaaacaaacaaacgaaaaatacaaaaacccccacaacactccatttcattctccaagtccctggcaaccactattctttttgtcagtatgattttgactactctaagtaactcatataagtggaatcatacagttttgcatgtctgtgtggctggcttatttcacttagcataatgccctcaaggttcatccatgttgtagcatattgcagaatttcatttctttttaggctgaagaatattttgttgtgtagatataccatattttgctcatgcatttattcctccatagacattgaattgctttcacctcttggctattgtgaaaaatgctgctatgaatgtgactgtacatctatcactttgagactctgcattcaatccttttgtgcatatacccagaagcagaattgctggatcatggcaattctatttttaattttttgaggaaccattatactgctttccatagaaactacattgttttacattttcaccaacagtgcacaaaggttccaattttcccacatccttgcccacttttgttagtttcttattttattttgatagttgccatctgatgagtgtaagctgatatatcattgtagttttgatttgcattttcctaatgatgagggatgttggcatcttttcatcattagggaaatgcaaatcaaaactactgtgcttgttggccatttgcatatcttctttggtgaaatgtctactcaagtcctttgcccatttaaaaatcaggttatttgttttattgttaatgagttgtaggagttctttatatattctggatgttaaccccttaccaattatatgatttgcaaatattttctcccattctgtaggttgccttttcactctgttgattgtgttgtgagatgtacaaaagtttttatttttatgtagtccagtttatttttacttttattggctgggcctttggtaccttatccaagaaattattgccaaattcaatatcataaagctttttccctatgtgttctaagagttttataattttggatctttgatccattttgagttaattttgtatatggtatatggcaaaaatgcgatttcattcttttgcatgtgaattaaccagtttactcagcactattagttgaaaaaaccaccctttccccattaaatagtttggtacctgtattagtccattttcacactgctataaagaatacctgagactagagagtttataaagaaaagatgtttaattgactcactgttacacatggctggggaggcctcaaaaaactttcagtcatggtgggaggggaggcacgtcttagatggttgcaggcgagagagagtgtgtgaaggaggaacagccaaacacttagaaaactcactcactgctcactatcacgagaacaggatgggggaaaccgcctccatgatccagtcacctcccaccaggtccctcctttgacatgtggggattatggagattacaattcgagatgagatttggatggagacacagagccaaaccatctcagtacccttattgaaaattattgacatatatgtgagggtttatttctgggctctctattctagtccattggtctatatgtctgtctttatgctaataccatactattttgattactgtagctttgtagtaagttttgaaatcaggaagtatgagacctccaactctgttcttttcaaaattgtttcagctattcgatgtccctcaagagtccatatgaatcaaattaagttttctgtgccttgtctacagattgactctaaaaagtgaagaccaacaaaagacattaactatttttcattgttgagccaagcagtgtaatcagaactgtagagaggtatatttgtttgttagtgtggtcctaatgaagtaccacaagctgagtgacttaaacaagagaaataaattattccacagttctgcaggccagaagcccaagatcaagatgctgacagagtcatccttctctagggcaaggactaggggaggatcaattccagacctctctcctagcttctggcttttggcagcataaatgcaatcttcacatggcattctccctatgtgcatgtctgtgtccaaatttcccctttttattaggacactagtcctattggattagggaccaccccaatgaccctaattaacttaatgttaacttaattacctctgtgaagagtctatctctaaataaggtcatattctgaggtcctgaggatgaggactccaacttatcctttctgagggacacaattcaacccataacaagaggaaatgtaatcctatctcactaactctgttccatttgatggaaaattcccaagtgtcaaagtcaaatggacactctttctttacactccatcaaaatcatgtcatattttagtttgcttcatacttgaatagaaatgttctggttctgattttagtttctaattacatttctctttcttttacataaataaacaaataaaaaactattaagtctcaccttaccaataagttcatccgtgttctaaactatatcattatgactaaatgtgggactctgacaatctaggttcaaattccgggtctgtcaatagctctttgggcatgtcaattaaactctatacttcagttttcccatattgttagtggagtaagaatgctgtctatctctttggaatgttgtgaggaatggaatgagtgtacaagaatatttagagcagtacctggcacgtaacaagcactctcaacaaatattcactatttactgtggcatactatttgttgaaatccagctgctttatcttaaaagagatgttcttctcagtgccccatgagtctttttgtagagcaaacatttctgccttgttcttctttaagagtgtcttagctgtttttttttcttgctgttttttttgagatagagtttccttctgttattcaggctggagtgcagtggtgcaatctcggctccctgcaacctcagcctccctggttcaagcaattctcgtgcctcagcaagtagctgggattacaggcatccaccaccatgcctggctaattttttgtatttttagtagagatggggtttcgccatgttgcccagggtggttttgaactcctggacttaagcattacatcggcctcggcctcccaaagtgttgggattacaggcatgagccactgcaccttgccaatagtgtcttagctattcttgatcttttacatttccttataaaatctggaattatcttgttaagctctgtcaatgaaaaagaaagagagagacagacagagaaaggcagagatagagacagagaaaggcagagatagagagagacagagtgagagatgtatacagagagggaaaggagggaagaaagaaaactctgtagagactttttatttggattgcactgaataaatcattttgggaggaattgatacctttatactattgagtcttctaattgatgaatgtggtatacctttaggtcttttaatcaaatagttctgtgtaggaaaaaagcctcttgtatggcaagaggcatcttgaagctaaactgcaatgatgaccaatgtttaattcctgcataccaaggtggtttgcagccaggtcttaaaacaatacctgtagcacagacaacccatcataaagatggtcacctaacctttccagtggtcatgagttgcaataagaaagtctgagatatgaccagctgcacctgttttaccatagaaacttgctatagaaaagatattttctgaagggtgggtatggggatccactgtgtcatggccaccagagacatcacttctgttcataagtccccattaaatatttcttcctgagaaactggattggtcaggctctttgttttgcttctcagctcccttggcctttgggtgtgggtttgcatagacctgctcacctcagaacactcttaatgagagtgttttatgatttttctcatagaggtcttatacatgctttgtttgatttacttttaagaacctgattcattttatttaattagaaacagcatagttttaaaaaataattttcaacctttgaaattatctgatgcttgtatatacaagtacaatttacttttgtattttaagtcaaaaaaattttatagccaggcgtggtagctcatatctgtaatctcagcactttgggaggccaaggtaggaggatcatatgcggccaggagtttgagatcagcctgggcaacatagtgagagccctgtctctacagacaaacaagcaaacaaaaaaattagctagctaggcttggttgtgtgtgcatgtagtcccagctacttgggtggctgatgtgagaggattgcttgagcccaggaggtcgaagcagctgtgggctgtggtcatgccactgcactccagcccaggtgacagagcaagatcctgtctccaaaaaaagaaaattttaaaccaacaaaaattataaataaaccttttacttgggaataattttagatttatggaaaaattgcaaatatggtacagggagttcctgtataccccaaacacagccttccctaatgctaacatcttatgtaaccacagtacattagtcaaaaagtaacaggtcgacatcagtacattactaacaggtaaattccaggctgtatttggatttcaccagtttttccactagtctttttttctcttccaagagccaattcagtatacctcattgcatttagtgtactttgatttttgaaaacagctaccttgcggaaccctgttattaattctaatattttatatattgattctttggaaatttctttgtatacaatcggcaaataataattttgttctttccttcccagtctttgtattttaagtgtctttttcctgctgtattgtattaggtaggacttctagtaccttgatgaatagaaataatgatggttggcattcatatcttattcctgatctcaaaggaaaagctttcaacatttccttaatatgatgtttttgtaagacttttctagagactctttctcacatcatggaagttcccttttattcccagtttaagagaaagcatttttaaaaatcatcaatggctatgaattttatcaaatatatattttctgcatctattgaaatgatcacatgaatttctgcttttatctgtttatgtagtgtattaactcgaatagattctctaatgttaaattaaatttaaaatcctggaataaatccaaccttatatcaggttatattattttttttatatattgctgaactcagtttgttaatatgttttttaggatttgttgcatcgatgttcttatgtgaaattgacctataatttttgctttgatatcaagataatactggcctcataaaataagctggggcatgactttcttgtccgcattcctcctctggaagagtctgggtaaaactggaattatttcttccttaaacatttcactctcatcagtgtttaaagccaagaaatatagcaatcccggccaggcaccgtggctcatgcctgtaatcccagcactttcggaggccgaggcgggcagatcacctgaggtcgggagttcgagaccaacctgaccaacatggagaaaccccgtctctactaaaaatacaaaattagccgggtgtggtggcgcatgcctgtaatcccagctacttaggaggctgaggcaggagaatcgcttgaacttgggaggcggaggttttggtgaaccgagatcgcaccattgcactccagcctgggcaacaagagtgaaactttgtctcaaaaataaatacataaataaaataaaattaaattaaaaaaaagaaatatagcaatcctgacatgagtgtttcacaaccatcttcactgcactgtttttttccagtgccgcgaagcatctcctcatgtattacactagtcatttacagtaatgaatagagcacagatgacagcttctccgcgctgggctctgtaatgctggaagcaatgggaaaccgcagatcatttataccagtcttcccttaagcctggtggataactagtttttgtaagcttgcaggatatgcgatggggggatgcccccacgtgcttgtttttttcaggggaggaagaagacaggggattatagaaagcgaaggtacagggcccctaaaaccaggacagcagctaaattcacattccctccaaagctattagtggacatattggctgggagcaggatcagcatagtagtgtgggtgtgtaaggagttctccttgttctgtagttctaggagtctccctccatccctcttttctccctactggctcagacatgctcagcaccttcagtgatggggagacctctacagtcatttgttcgggagaacaggatgtgacacttcccctggcattctaggggagctgtccagggcacattccaggaaaggaagtgggaggtttccttttcccttttcctccactgaaccctgggcatgtttacttcactggggacaggttgaggctatgctgagagaggagtagaaggagataactcctggccacaatagacttcttcaagatttagctaaaaggtttcccaaagtttggtctctggacccctttacactcttaaaaattactgaagactccaaagaattttcatttatttgggtcctatctgttgaaatttaccatactagacaataaaactgagaaattacaaacattactaattcatttaagatagcaataattaatgcattaccttaatataatctatttttatgaaaatgactatttcccaaaacaaaacaaaaaatagtgagttgaaagtagtattgtcttacatttttgcaaatctttaaaatttctggcttaccagaagatagctgattctcaagtctgcttctgcattgaatctttgagcctttttttatggctgagtagtattccatagtgtatatgtaccacattttctttatccaatccaccatagatgggcacgtaggttgattccatgtctttgctattgtgaatagggctgcagtgaacatacaaatgcatgtgtctttttggtagaacaacttattttcctttgggtgtatatctagtaatgagattgctgggctgaatggtagttctaagttctttgataaatctccaaactgctctgtatttttagtaagacaaggttttgccacgttggccaggctagtctcaaactcctgacctcaagtaaacctcccacctcagcctctcaaagtgctgggattataggtgtgagccaccgcgccctgccttgctggagtctttagggttttctaggtatagtatcatattgtcagctaagggagataatgtgacttttccttttcctatgtagatgccttttatttctttctcttggctgattgctctggctaggacttccaactacattgaataggagtagtgagactgggcattcttgccttgttcttgttcttaagggaaattcttccagcttttgcccattgagtatgaagttggctgtgggtttgtcatagaaggctcttattattttgaggtatgttcctttcgtgcctagtttgttgagggttcttattataaagggatgttggattttatcaaaaacttttcctgcatctattgagataatcatatcatttttatttttaactatttatatgatgaatcacattcattgatttgtgtatattggaccaatctcacgtcccaggaataaagcctgcttgattgcggtgaatttactttttgatgtactgctggattcaatctgctaatactttgttgaggatttttgtgcttatgttcatcagggatattggcctgtaggtgtcttttctcattgtgtctttgccagattttgatatcagggtgatgctggcttcatagaatgagttagggaggagtccctcctcctcaattttttggaatagtttcagtagaattagtaccagctcttctttgtaagtatggtagaattcagctgtgaatccatctggtccagggctttttttgttggtaggtttttaaattactgattcaatttcagaactcgatattagtctgttcagggtttcaatttcttcctaattcaatcctgggaggttgtgtgtttctaggaatttatccatttcctctagattttctagtttatatgcatagaggtgttcattacagtctcaagattttattttttatttcaatagttcttgggggaaaaacaggatattttttatttcaatagttttggggaacagatagtttttttgttacatggataagttctttagtggtaatttctgagattttggtgcacctgtcacctgagcagtgcatactgtacccagtgtatagtctttaatccctcaccaccctccgcctttccccctgagtccccaaagttcattaaatcattcttatgcctttgtatcctctgaggatcttttgtatttctgtgggatcagttgtaatgtcatctctgtcatttctgattgtgcttatttggatcttctctcttttttcttttttaatctacctagttgtctatcactcttgtttatccttttgaaaaacaaagttttggttttgttgaccctttgtatggatttttgggtctcaatttcatttagttctgctctgattttagttatttctttgcttctgctagctttggggttagtttaatactcttagaatattcttcatattgagctagagtctgggtcctataactcttatctactgctctggacctgtcttttaatctagatcagtagttctcactgtgtggttatagtaccaccagcatcagcacccctgggagcttgttagcaatgcagattcacaggccccaccccagaactagtgaatcagaaactttggggatggggtcggcagtctgcattttaataagccctcctggtgattcggagacttgatgaagtttgggaaccactgttttgtacacagcttctcaaactctctgtggtaaaggatcctcccacctccatccatgtggaccttccaggtacaaccagttctgcaacactgaaaatacattctgttcaatgggatgtgtctgctgaccatgaacttggatgtcaccacagcattaaattgctttaaaagtgtccaaatggccaggtgcggtggctcacgccataatcccagcactttgggaggccgaggcgagcggatcacctgaggtcaggagttcgagaccagcctgaccaacatggtgaaaccctgtctctactaaaaatacaaaaaataagccaggcatggtggcacatgcctgtaatcccagctattctggaggctgaggcaggagaattgcctgaacccaggaggaggaggttacagtaagctgagattgcaccattgcacttcagcctgggcaacaacagtgaaactccatctcaaaaaaaaaaaaaaaagaaaagaaaagaaaaaaagaaaaagcatccaaacgctctcaatttctatacttaccccatggaagatcattaacaaacagttcaggagatgagcacttgtccccggaccatgacttgagtggcggtgctccagatctgcacttctcaaacttaatgtgggcacaagtcacctggggatcctgtgaaggatgagttcactacatctgggagggacctaaaattttgtatttctaagtgcccacgggatattgatgctgctagtccatggaccacacttagaatagcaagctctagactagagcagtgcagaatacatctgatatcttttctcatgagtgtctacctaatatttgaagctaatcatcatcctcccattctccaagcttcttctctaggctaaatatgaccagttctctcaactcttccacatccgcaatatttccagatctgctccccacaccatacatgctggccccatagatgctatcttttcactgccccaaagccagttctcctcttcttttttctcattcttccccctacccctcgccaccagcatttgtagctgttttgttcagtgtttcctgggctggctccagcccttgggggattttcagatggctcaggcttctgggaagctcttgcagctggaggaaggaaattaccccagagctggacagtggaatgtgcatctgcctaacctggactcttgccctggtgtgcctcctgctctcactgatctctcagaggacccctgcctgccccatctagagtcacctcaatttgactctagtaacctgggctttccttcctccactcactccttaaagcatcctggggaacttaagggaagggaggatagcatagagaggtgagaggggttgcttgtttgctctggagaggggcttctgacgaggccaagacccttcacaaggatgccccatcttcactaacccaatgtttcttctttatctctcaggactgcccagagccaagctcactccccgaaagccagtcttgagccaaggctttgttttcagaagttcttataaaatgtcttttctgggaaggcgtgaagggattgagccagtctcactcgttaacatctcagcaaggattcatctgtcaaattagtgaataatttgcctagcccagagggcataaaactcataggtagataacttaaaaaaattatacacagctttacagagaaatgaagacttaagtagattagaacttccattttgttcccctgaatgttggcttttctgacatgtccatacatttcacatggttatgattagtgtgagtatattaatgtagacttctttcatttaacttcttttagcatgcgttaatatatacatctcaaggcagccaaacgttggatgtgcttttgccctttaacatgtacataaccctccaagtaatcctagagtagcatggtggttgtaaactcaggccccatcacttactagctgcgcgacgctgggcaaattcttaacatctctgagcacaacctgtaaaatgaggataaaataagaacccacagcatagagtttttgtgagaattaaataagctgaggcatgcaaaaactcctaaaatagcacctagccccttataagcacccaattaactttagctgctctaattataattattactagtatattcaggcagtcatctgtttctaagcattttaggttatttgcagtttttttttattataacaaagttgttgttaacctttatcctttctggtagccatgtaaggattgccttgtctactagaagatattaagatgataatgacaatgccaagataatctgagaagagaatgattacaatcagcaaagggctcagaaaggaagcatttcctagggaagggagagagcaagtgaggcagatcagaatcgaaccagtcgaggggggcagttgatggacgagatgaatttgggatatctttcagaggaaggcacttcaaattcttgttatttatttcactatggtgctctctgtgattggaacagcttgatatagtttggctctgtgtcctcacccaaatttcatcttgaattgtactcccataattcccacgtgttgtgggagggacccggtgggagagaattggatcacgggggcaggtttcccccatactgttctcgtggtggtgaataagtctcacgagatctgacgcttttatcaggggtttccgcttttgcgtcttctttctctcttcgcctgctgccgtccatgtaagatgggacttgctcctccttgccttccaccatgattgtgaggcttcctcagccacgtggaactgtaagtccaattaagcccctttcttttgtaaattgcccactctcgggtatgtctttatcagcagcatgcaaacagacttaatacacagctcctggcacatcataggtcctctgtcagctcctggttgaaagtatgagttgtctgctagcttcagcaggagccgccaacctgctgtgggcggccctgggtccggatcccagccatgtccagatttttaaagtccagatgttttgtctggcgccactcggatctctgcttcctgagtcatgggacgagaaactcctggctgggggcagtggctctgagcaatggtctccttctcctcctgtcagcagtgagaggcctctcatggaatttgggtcatgggggtgggggtggggaatgatattcattaagagaagttggactcttagcaggagttgaaggacgagaggtgtctgctgggtctgagtgccagctggttcaacagcaagggaagaaagagatatggcctgcatcttagaatcttagcagcgctgtctctttcgtgggaaaaagacaagtgaggataagtacagaaaagggggaagtgcctactggcattcttagatagcttattttgggcgggggtggagggcgtttgcagccatcgtgtggttttgtctacacagtaatccaatgggaaggcatgaccagctgaaatttaaaagtgagaaatagactcagtgcagtctagtgagccctcatcatggaattccttgtctctttccacactgtttcttctgggaataggaacttgacctagtagtgggagggataagaaacacccctgttgactctcagttcatgcagtctgggtggggctggttccacccaaagcttcagaggtgggctcatgaatcagatatgattcatgaaagtaccacatcctcctaccaacttctgaccaggtgcacatgaccatgctaggcaattagagccaatgagaatcagccctagggttttgctggaactatctttaggctcctaagattttaagatataggttagaggcctggccattttgtcatcctaaaggggtcaccttcttgggaataaagttaatttagaggaaagcagaactgagagaaggaaagagagaaagaattaagaaatcattttaaaacccagatctcaccatgaatccatggatccagtcagcctgaaaattgactacccttggaattttcatttaggtgaaccaatacattttccttttttttcccccggaaagacttgtagctgactttctgttacagctgaaggaattcttatcatagagtatagcagtgaagttgagacttggtcagcagagtttgtgcttgtctttctgccttccctcccttccctgcactgtgcagtatgtaaatccctagtcctgagaagatttctcaatttgctaccttgtataagcttacctagttggacttgtggtggttaggaagagtgggtggccctacatattccaatatcttttaaaattttatttatttatttatttagaaacagagtcttactctgtcatccaggctggagtgcaatggcgcaatctctactcactgcaatctccgcctcccaggttcaagtgattctcctgccttaggctcctgagtagctgggactacaggcgtgtgcctccacacccggctaacttttgtatttttagtagagatgtggtttc[132 bp omitted]tgtgtttttactaggatttcactgggtccactcagtaatgtgctggtaaatgtttaacaaagaaaggaaaaaaacctgttctgtagtgtttgccaatttctgtggtgcaaatattccagccatggctaatcccaagctaacaacataacaacactgaatgcagagatggaaagaggtacaaagagcacatgattagatagtattttcaccacacagatttaatagttgtaggtaactgcaagagattatagatacattgtagtaaataattaagaagttgtaagttttgactatttagtacctttcttattaatataatttatttaattgtaagttacataatttaattttgatagcatctctgtttaacaactggctcacaaaattcctgaaaattttataattggctcttccgagctggaatgagctagttctaggccaccactgatctcatctagtgccctggtagaaatgattgcttcttcaagagttaggagtgtaagctctggcttgaattaaaaaacagacctgaaagtaatcttgaaagcttgattttggtaaaggtcagtaccaagttgaagtgtgcagtgaaactgaatacattactgtctactgaatggaatttatgacctgaagatattcacaaatagctgtgagatagcactcttactttgcatggtcagctggtcctgctctgtagaaggggccataaagcagtaaaatagatgtgtagggcaggagtcctgtatcaggcaatttgaacctgcagaaaacagatagcacatctgtattagtctgttcccccactgttacaaagagctacctgagacaaggtaatttataaagaggtttagttggttcatgtttctgcaggctgtacaggttctggggaagcctcaggaaacttacaatcatggcagaaggcaaggggaagcaggcaatgtcttacatggctgaagcaggaggaaaagagagaagtgggaggtgctacccatttttaaacaaccagatctcatgagaactcactatcacaagaacagcaaggggggaaaatccacccccataatccaatcacctcccatcaggtccctcctccaacattggggattacaatttgacatgagatttgggcggggacacaaatccaaaccatgtcaacatccaaattagcataatatgaggagtgtttgaggaacagactctctacaaaggtgtgggcaggtatagaaaaaccacagagatacagtagaattccaggtctattaacagggctccattatcttccctaggcctgcaaggaggtacaagctgggggtaagagggactcggttaccagaacctggagacagaagggttgggggactgggatacctgacatggaatgggattttggactacagggagagacatgcggaataaatactgctctcaatctcctccttccctctgctcttctagcccagctccccattggctaggcccacccaaaggccagggcaagggatcccattgatgtcaacctcttggggcattgagcacgttggagaaaggtggaaagggtctcacgggtcaaatggcaccttgagtatcctgccatggagtgcacatcctgtcctttgtgttgggctagaaaaagggccagggaaccttgcttttggaattgctatgggccaccttcatcccagaaacatttagggtctggtcacctgttcctgcgaagggcaggaggctatttgtgtagatatactgcttctcccctgggaccaacacttctcttccagcctggcatgaggagcatgaggtttggggagagacccttggccatgtcgtactctttactgccaaggccatcactagggaccactctttgtctgtccagtgagtcttagccccctatctcaagattctgcaaggtccttttctgtggatactcagttgaggaagccctggtctgggagccaaaagacctgggatatctgattctgatgctatatcttgaggggttaccagatcatgtcactagtctggatttttgtcatttgcaaaatcagtgggctgttccagatgaacatgattcccagtgacacctctgactctgaagagcgaatccaagattttatgagtttcatcatctctaggtcatttgtgtaatgaaaagcatgcctttccacagccaggaggtggcagcaaagctctgttttgaagggggcgttaggccagggtaggtactgctctccaactccctagagctgaaagttcaggtttggaggctcggttttactcctgaataacaacaacaacaacaacagcattattattttcattattgttagtaaaacagaagcaacaatgccatcttcaatttgggcaatgctgcatagttgaggaaacatttttgtgcatcgcataggaaccttttaacaactgcatcctgtaggtaggtaatgccaggacttttagccccatgttgaggctcagggacatttcttgacttgcccgaggccctctggaaagtattgatgtgccaggataggaacccaagctttcttgcttttgttcttgttctgtgcactccctatcttatggtgtggaagacccaaggcaaggtcccctctacctccttttccattttgcaagagagtaggagggtccagaggtacccagctcagcctgagggcttaagactggtttccggctgccagatgaaatttgacatatacaagctgggaaagaaaactcagcacacaaacctcagcttcactctcttctctttcttctagtccccagaaaagaaaaaagatatgtatctttagttacttaccatcagggtgtacctggtgtctctcttattcattcattaattcattccttcaataatcagagttctgatgaagtgtaagactctgttatgtactgtgaaggatataggaaggttctttctcttctgactcagagatctgggggtcaggagctgggatatgggagccaggtaagtgcatagcttcttgggggtatcttaatcctagagagcccccactgaactgggagttcttgaggagatggaattcagatttggttttgttggcgtgtcagggagaagtgaatccacaggatttaaaaaatgacccccaactccatatgttaacttctcaaaccagagaaaaccccttagagacacagccaaaaccccagactgttgtccaactgaatccctgtcttgtactccacctacctcctggggccaggtctcaaccctccgcatcacgataacaggttatcagagtgcgtacggtgtgacccactctataccacctgtgcttcttgcgtattcttatttgcttctcaaaacaaccctgtaaagtaaactgttacactctatttcacatctggggaaacagagccttaaagtcatgaagtaacttgcccagggtctcaaagctagtgagtggtagcagaattgagaccctgacaggttaggactcaggatcctgaccacctgtccttgcagagggaaaagccaccaaagtgagactgaagagctgcaatcttatctcctcctcaaacactgggcaagtcataacttgtctgcatcatctccagaaaatgagggtattacacttgcttggtcttctaataggcttgttgggaggatggaatggaaaagagaaaaatgggcctgtgacaacttagcatcatacaatgttgttctgtgtgttcgaaataatattattctccctcctgactttggatttttttgactgtgaagattgaggcaattgaaaagatcatttcagtggacactttcagcaatgatgatggtgatggtgatgatggtgatagtggtggtgatgatgatgatggtgatggtgatcttgagaaggtggtggtggtggtgatgatggtgatggtggtggtgatgatggtgatggtgatcttgagaaggtggtggtggtggtgatgatggtgatggtggtgatcttgagaaggtggtggtgatgatgatggtgatggtggtggtgatgatgatgatggtgatggtgatcttgagaaggtggtggtggtgatgatgatggtgatgatggtgatcttgagaaggtggcggtgatgatgatgatggtgatgatggtgatcttgagaagatggtgatggtgatgatgatgatggtgatagtggtgatagtgatggtggtgattttaatagtgatgaaggtgatgatggtgataatgatgacggtgatgatgatgatgatgatggtgatgatgacagtcataataatggtagtggtgaagttagaggaaggtgacctcagaatcattttctgctgccaccgctgctgccaatcctcctcaatttccaaccccactgtgtcaaaggcatttggggtgggctggtgatgagatgaaaaggagaatctagaaggccagagagaaggaataatctaagatgttaaagaatagtgtacttatctcagtgcctggtacatagtaagccagtactcactatcaggtaatagaagctatgaatttttaaaacagttttattaagatgtaatcatacaccatacaatttatctgtttaaagtctaaaattgaatggcttttaatatattcacagttatgctgccaccaccacaatcaattttagaacatccgttttcccaaaagaaaccctgtgcctcttgctgtcaccccaaccgcctcatccctcctggcaaagctatgatttttattgttatctacaccttacagaataaggaaattgagactaagcaatgagaataacttgcccatgaccacacagttggtatgtgacagcactgggattccatctaggtttgccagaacctaaagcctgtgcttctgtccacacaggtcagtttgaccaatgaggaaactcaggttcagagaatatatgtgatcaacccaaggccacacagctacagctattaagtggtcaggatgaggctcacatttagacttggctcctaatccacccataagtgtccttattccattttactgtgccccttcagggtaagcaaatcaacataatcagaatggatgagatccttaagatccgagagagagatgtgaaactagcagtagttttctttcccattggggagggagaatggtgcctgggtccagtctcgtcctggacttggaaagttaacatctctttggacccagctgctcccttttccttttggccctgaacaccctgaggaggctccatgcaggtggggaggagttaccctagctggaaggaggagcaaggtggtacctgagcccctatccaaccttttctaaagcatctgtcttcctaggagtgaatgagtttgacagtacctactaccttctcagatgttaaggggaactgtgggtgggcatgagagaattgtacgacaaagcctttaaaagggatgggatggaaaagcagagttgcttggcagcctgcaagtctaggatctccagggtgtaatttccactctgccctagacaactatagtcacagtgcttaatccatctgggccccagtgtccctatctgtaaattcagagagaaaatgaggaagtaaattgcaagaattatgagttcctaggaggaaaatgtactacagttatctgaaagaatctttattttctttccttccttctcttcttccttccttttggatgttttcagctttattgaagtataattgacaaaaggaattgtatatatttaaggtacacaaattgatgttttaatacatgcatacattattaactatagataggcctggtgctgtagatctccagaatgtattcatcttgtataactgaaaatgtgtaccctttgataaacatcttcccacttcctcctactcccagcctctggcaaccattattctactctttgcctctatgagtttgactatcttagattccacatagaagtgaggtcatgcagtgtttgtctttctgcatctggcttatttcacttagcataatgtcccccaagttcacctatgttgtcacaaattgcaggatttccttcttttttatggcccaatagtattcccaatagtatatgaatatatatattcaaatttgcatatatatgtacatttgcatatatatgcacattgtggtgatatatacatatatacgagatatatacatatatatacgtatatatggatatatacgtgtatatatatacatatatacgagatatatacgtgtatatatatatacatatatatgtatatacacattttctttatccatttatccattgatggacatttagtttgtttccacattgtggctattgtgaagagtgatgca[224 bp omitted]gaggcaggagaatggcgtgaacccgggaagcggagcttgcagtgagccgagattgcgccactgcagtccgcagtccgacctgggcgacagagcgagactccgtctcaaaaaaaaaaaaaaaaaaaaaaaaaaaaaaaaaaaaaaaaaaaaaaaaaaagatcctgattcaatttcctttggatatatgcccagtagtgggatggctggatcatatggtagttccatttttaagtttttgaaaaactgctattaggttgtaccaatttgcattcccaccagcagtgcacaagagttcccttttctccacgtcctcaccaacacttttgtctttctgataatagctattctgagagatgtagagtgatatagggtctttatttttaaatgtttgtggaagctagtgatttacctggccatgggttggatttccatgttttctacttggagcaaagatcctccactttcacattccttattttatatttacgatagagcagcaagaatctaaatatcagcttcatagaagaggaatggaccatgataataaacacagcagagccgggaatccgagtatttaggagaatttatttctcacacattttccctccactctctcggaggtgtcccatggcaacgagcatcaggtgagcctcattcttccatcttctgtgggagaaaaaaataattgtacataggaaatgagtcaactaaatgggagactgaacatcatcttgaagtgaagcagctggaaaatctggaacttcagaggaatattaaggaatggcgttgtttccctttgaacattgtaaaagcaaatcaatctagctactggcgacaggacaaacgccctgcaaaacaggggcttcatgggcagcatctgtagcaacagggacagacagggatgacagtgtcgtgcctcactgctcattctttcaagagcctggaaccacaggagtctttgctcaaacagtagcatttgggagtgtgcaaccagcagcaggaaggagaggatcaacagtcatcttccaagctctccctgggtggtccatgggactcccccggggcttgggatttcttgggaagaagccatactcaggtacttgctcttccctggccccctacatctcaggtacctgctcttacctggtccccacatctcaggtacctgcccttatctggcctcccacactcaggcattcgctcttacctggcccccatattcaatatctgttcttagctggcccctatatctcaggtacctgctcttacctggctgcccacgtctcggctcttggccctcagcttgttgacctgggactcagcgatgtccgccctctccgcggcctcctctagctcatgctggactctccggcatctggacagctgcgtgttggcctgctcctcctgcacaggagacagagggggtatgacgctgtagagcctctcagtccgattatgaggtgccctgtctctgaaggcctctgaggagttaagcaaccagggccctggattccctgatggcagagagggcagggaagctttctccagcgtgtgaggacaaggctcccagctcacgaccatgtgtactgcctcggatcaccttgcaggtgctactgtcccttctaggacctccacatgttcccttgaatctcttctatatggtatctgctccatagagatcttcgggggagacctaagtccagagctctcccaaggcacctgaaggtatagagaccaatggcccaagtctccctcgtcctgtgcctctgcccagcaccatctgtctaaggccaggccactgtactggtctatttgggggaatgtcaaggattcctgactaaaatgtcctcctgggcaccctctagcctgccgatcctgctgggactgtactcatcccatgtgcgtgaattgctctcaatattgaaccagttcaaatctgcttccctgaggtcaggattgaaccaaccaggctccagggaagggaggaaaaagagcaatgggagaagctcagtcatttgtccagggcagactcccctaaattttggtcctcagaacagtagccctgagggatgctctgcatacaataagaaggttctaaagtcaatgaagagtgagaaatggtatattctggaacccttcttccactttgtagagttgatgacatatcaaactctacaacatctacaaaatctgagatatccttgaagtaaagcaaccagggtaactttgtttaactcagattttcccaaacgatctcttttctataaaaggataagctcctccccatggcagccccaccttcctgctattaacatccctcagaaccagtgtcctcagaagacactttgggaaacactgattttagcccattccatttctttcctattgatttcacctatttgatcaaagggtggatgaaaaaggatgggatggagtggagggagttagggagggctgaggaaggctggagatgcctaggagggtgggctgtggtgggatggtgggaattaggatgaggtatctcaggtcaggtcatgggagcaggaatggctttgagggtagactggggtggttcgggagagtcagggtgatccaacgccagcagagtaggctaacatgctctagggggtgtcaagtgagtcacggtgggcaggatgaaggggatggagggggctggccaagtagggtgaggcaagagggcacagagatggtgaaggtcgtgaaggcttaacatggaccaggagaggaagagggcagttgtctctgtgtttatagcctgcaaatacaaactcaggcctgaggctcaggggactttaccaaccaggatggcggggacacccaggatgccccagggactgtctgtctgtgggcactgccggggacctcctgtgcttaccgcctcctcagcctgcctcttgtaagacttcactttggcctgcagcttgtccaccaggtcctggagcctaaggatattcttgtggtcctcctcagcctgcaaacagagtacacgtggcaggggcccgcaaacctatggtcacttctgatggggcttggtccatacagcattcactgaggaggtttttgggacccctacctggtaagtcatctccttgactttgcgttcgtacttgtgggctcccttcagggcttcagctcccctcttctgttccacatcaagctcattttccagctcccgcacctgagtaggatgaaaggaacacagaattcaaatctcctctcccaggcttctctcatggactcatgggccaatcattctagagtgaactcaagatcccctaatggtcattaaaaagtcaggaaacaacagatgctggagaggatgtggagaaataggaacacttttacactgttggtgggagtgtaaattagttcaaccattgtggaagacagtgtggcaattcctcaaggatgtagaactagaaataccatttgacccagtaatcccaatattgggtatattcccaaaggattataaatcattctatgaagacacatgcacatatatgtttactgaggcaccgttcacaatagcaaagccttggaaccaacccaaatgcccataaatgatagactggataaagaaaatatggcacatatacatcatggaatactatgcagccataaaaaaggatgagttcatgtccttttcagggacatggatgaagctggaaaccatcattctcagcaaactaaggaacagaaaaccaaacaccacatattctcactcataagtgggagttgaacaatgagaacacatggtcacagtaaagggaagatcatacactgggacctgtcagggggcagggggctaggggagggatagcattaggagtaatacctaatgtaaatgatgggttgatgggtgcagcaaaccaacatagcacgtttatacctatgtaataaacctgcacgttctgcacatgtaccccagaacttaaagttagaacaaaaaacgatcccctaatgggattttgccaagatgtctcctcctaggtcttaggagccacattttattgacaatgcaggtgctttgagcaagtgagaataagatgcccttactgggcagaggcagcctcaggtgcacagagcatagctggtgggtcaggatttgcttagatgctcccttttgtggagccaggtcgtttggcaagggcagcaaaagctaacctgacttgtccttgcaggtgaaacctgcccaactgttcattgaacttacagcagatcaagtaacttgaacttacagatcaagtaaggcagcagggatcacgaagagaacctgggccaggagtagtcaaagcactctccaggcccacttgatagacccaaagcaagtcagtcgccaccactgagcatgagtttctgtatatttaggatggagataatatttcctgcccagcctacctcaaatgtggagatcaaatgaaagtatgtgaaagtattgttagaatgacaaagcactacacaggtgttgttaatttcatagttgcttctgcctttcttgaagtcttgaggggaaagggcagccactgaggacataagtcaccaactgtggtcccaactccacaatccagagattgaagccagggaggggcagcagccagctgcatgctccactccactgggaatcccagtggctgcagagcagggccaactctgggcttggagactcactagatcagccttgaaaactactaatcggacaggcttactctgggtgctgttcccaaaacctccccaccctccacctcctggacccaggaaatgtcttccatcaggttctacaaaacatttgttttcctgggaattctttctaggcttctgtaaggtttatggaagtcacataaccgggcaggggatgggaggacagtcaaggtgcctcaccatgggagggggagggtggccgagggctccccgccaacccaggaatcaaagtatggcagaaggtgtcatgagatctaatccttttcccataggagggatccatgagaagaacaggcctaaactcattgtagtggaataggactggggataattgaaaataaacattaaagaattttgggggaagttctaacttccctggtgtttacttttgttattcaaaaagtctatggccttgttgtttttagcacctccctaaaaaaaatcctttcacatttaatgggaccatgtgcctggggaggatatcctcgggtggtttgcataaagaatgacagtatttggaggctttcctgctgggaaaagttgtctccttctcttttcctcctcctcatcctcctttcctccctctctttcatttcctgtctccctgggacaagagacattcgaacagcctcctccgcagagccctcctccaaaatgtcaaccactagtggagcccattttaaaatgattgaaataaaccacatgggtctaaaaggaaaagcaagggagacaggaaacaaagggaacagtcagcaaagaaactgaataataactgcaggatacgctcccagataaagaaagagcagggatgtccaggtgtcggggggttgaactttgctggtgcatcaagctaaaggaagaagccccgatcgccctcttttggggctggagcaagagacatacctgtgccagaattgcagcctgcactgacagatgagaaaagctggggagggaaggaaacctgagattgggagaaaacggaaactgcagattttatgtaggatgggctgtgttgatcaaagtgaagcttggtccaaaatgtaaatgcatcaaaatgagtaattttatgactgtagagtatatgttaatagttttttccatgtatgtgcgtgcatctgaatctgcatagcaaatggaatgtgaacattaacatacatcattatattacatttactgaggtgtgagcataccaaaatagatgtgtgtgtgtgtgtgtgtgtgtgtgtgtgtgtgtgtgtgtgtgtgtgttttggggcataggaacaggtgaaacagaaagaggtgagaaatgaagctcacagggaatttttcaagcagtcctgaaactgaatttgcaatctattcattcagtggccttttcccaccatctcagtttctggactgtggttctgtccgaggctgtcactttcagagtaacagtcctctcaaaaactctacccggttctccagtttctggatctgcttcttcccgcccttcagcgccagttgttcagcctcatctagacggtgctgcaggtccttcaccgtctgctccaggttcttcttcatccgctccaggtgggcgctggtgtcctgttccttctttagctcctcagccatcatggcagcctggttaagttcacaggacacatcagaggccctgtccgcccatccctacccagagcttgcagaagaggcgaaggctgggatcatggtgctgagcctcccctgtctgactggggccagtcattgctgattccccacagcctcccctcccactttgccactgctgagactgtacctcattacatctgtctgggaagccaccactaaccgattgttgtcataagagatgaaacatacttgccacaccctggctcagaggccccactttctcagttccaaaccccatctctgaaaaggaagaacagagctcacatccgtgatggccttcttggccttctcctctgcgttcctggactcctggatcgagttctccacctctgcctggcactgagctatgtcagcctccagttttttcttggtatttatcaggcttgtgttctacaagaagaattagatatcaggggtgtgggttctattggggcgcttaaaaaaattgggagagggttggctggggagggaagtaaattgtgatcctgttccatttcttatttttcacatgggtgacctgctgggtacagtactgtacattctttctttattcttaactgaacagaaagtcctgaaacagacccaagaattgtacatgaaagaattcagtaaatgataaaagtagaatttcaaatatttgaggatggatagattattcagtaaaaagtcttggaacaaggaaatgatgatagacatactatatgaaatgaaaaataatttaaataatcaaaatatgccataaatagaattgtaaggggtgacgacaaactggaaaacatttgcaatgtacattacagaagaaaatattccctttcttaacatacaaataaggcaaatcaattaaaaaaagggcaaaaactacaaatgggtaaaatactagaagaaattcaaatggccaacaaatgtgataaaatgttccacctcattagcaataaaaaaaatactaaaaactcagtgaggtatgtttcagcaataaaattggtgaagatttttaaaataagagctagagtatttgagaatttatagaagagaactctcacacgtttccccagtggaaataaaaattgggacaaccttgttaaagaacaatttatattacaaatacttttgctgtttggaccttgaaatttcatttttagaaatttatttacttctagaaatattaagattatagtaatcatagaagtatatgaaaatttagttatgaggaagttcatcaaaatagtctttctaaaagtaaaatttttattgagaacaatctaaaataaccacagaagactgattaaatgaaagggccataatatacaagtagaatagcctacttttctgtcattaaaaatcatatagaagactatttaaagatgtcgaagctgggcacagtggctcatgcctgtaatcccagagctttgggaggctgaggcgggcggatcacctgaagtcaggagatcgagacaatcctggccaacatggtgaaaccccgtctctacaaaaatacaaaaattagctgggtgtggtgacaagcacctgtaatcccagctactcaggaggctgaggcaggagaatcgcttgaacctaggaggcagagattgcagtgaactgagatcgcaccactgcactccagcctggcgacagaaagagactctgctctgtctcaaaaaaaaaaaaaaaagatgtcaaaatatgttcatgattgttaaattcaaaaaagaggttgcaaaagattgctcatactttgactatatatatatgtatttatttttaattaaaacttttttttttttttttttttttgtagagacaaggttttgccatattgcccacgctggtctcagactcctgagatcaaacaatcccaaattcctgggattagaggcaaaaatataatatttatataattcacaatgggcctaagaatgagagaccccagaatgttaataatatgcttgacttttttcttccatgtatttacttgttttttctatttttttaaacaaaggagttttaaaaacttttataaaaataattattttgtgtttttgttgttgttgtttgtttgtttatttttttggcagggtctccctctgttgcccaggctggagtgcagtggcatgatcatagttcattgcagcttcaactcctgggctaaagcaaacctcccaccttggcctcccaaagtgctgggattataggtgtggcgctgagccgggtcaaaaataattattttgaaataaaatcttaatattctaaggtttccacttaaatagtacttccaggtgccttacgtaataattaatccttcgttgctctgatttccccacaacgtgcaagatgtttaatgtttggatgagagaaagctcagaaatctgtcaatcaagagtcagttattccaagaagcaagcttaaaagaaaatttgtcttgaccactagtctgggagaaaccgggtgctccttcccacggcgtgggccctgagtggagggatagcggaagcagctgcacggtgcaggaggcgctatctgccccagggtggaccttcagcggaggagtgagggccgacgcacctgggagtgcaggagctgcacgcggtcgctggcgtccagcagctcctgctctgacagcctgcgggtccgctccgtctgttccagggccaccttcatttcctccagctcctccagcaggaggccattcctgcgctccacgatggccagctgctccttgaggtcctcattgctcctcagggcgtcatcgagatgcagctgggagtcctgcaggggagacccagagtgaggccagagccgcctggcaggctggggcccgtccaggtacgcagaggcggccaccgtgctcaccttgagctggccctggaccgtgcgcagatgcttctgggtctctgccatctggcggttggagtggcccagctgaatctccatctcattaaggtctccctccatcttcttctttagcctcagggcgtcgttccggctgcggatttcagcatccagcacgctctgcagggcctctgctgcccgctggctgtttctttttagctgctcgatttcttcatccttctcaatgaccttgcggtctagctcggatttcacctggctcagctctagctgcacgcgcaagatcttgctctcctcgtgttccaaggaaccctgacgaaagcaaaggagtgattgagagtgccgtggacatccaccttcatgaatgggtattttcatccccatacgatcaaatgggtatgcgtttttttaaaaaaattaaatttaaatttttttttttttttggtagagacagggtctgtgttgcccaggctggtcctgaactcctgggctccagtgatcctctctccttggcctcctaaagtgttgggattacaggtgtgagccatggtgcccagagcccaaataggttttgtgtttttttttttttttggacagagtctcattctgttgcccaggctggagtgcagtggcacaatctcggctcaatgcaacctccaccccctgggttcaagcgattctcctgcctcagcctcccgagtagttgggattacaggtgcccaccactgtgcctggctaattttcgtatttttggtaaagacagggtttcaccatgttgcctaggctggtctcgaactcctgaccttccaggtgatctgcctgcctcggcctcccaaagtactaggattacagttgtgagccaccatgcccggctgcaaataggtattcttatacccattttatagatgaagagaacaatattcagagaggtctgagtatttggcttgctcccaaatatccctaatagtgatgaaactgggactaaaactttgcatcgctcatgaacaaattattttatgacttgagatagagtatctttcttaattagtgaaaattttattgagggtatctattataatagtgaccataaatcaggagtcaacctattctctaaaatgacagggcaactgctctcctgttatcctgtgtcggttcgtatttccctagaaaccaccagccatcctgaccaccaccgattactgcatcgggagatgctgggtgtgtttggattatacaggattcttgatagccaaaaatgattgtctgtgcctctatgttaaacataactgagagattctgcgctgctctcaggatgttaggtgattgattttctgcttcctgagaggaagacattgaagaacataatgaacacatttatttattttcaaaggggaactgtgccagagaacgcctaggagataaagtagcagcccgtggatgtttcagcccctgggatggctgaatgttactcccaatggagactcagggtctcctggcaggaaaggccccatggggtggtgaagggcagcctctttcagttccctgtcctcctgaatttctgaatgtcatatcctagacacttacctccacttcttctaaggcgacctgcagatctgacttttcctgctccactagcttcttggtcttttccgcttcctgaagattcttgccagtttctgcaatctgctcagttaagtcggaaatctcttctgcaaaggacaggcttgatttaggctgtttcaacaggctccagtttatagtataggcatttgccaggcaattcagggatgggcgattcattcatgacatttatacaggagagaatacagggcagccgttcagatgaggtgttggcaagacagggatgtgttgcctcacctgcactaggcagacaggaaccacaagtaaagaatagaaacttaaaacttcaaaagtaccatatacaaaacggtcatagagaagaccagagaaaacaactgtggggaaaacgcatagaatcatagtctgcagaaccagaaggggctttggaaagtgttgggtgtggtcttctgattttgtagatcagaaatctgaggtcctaagggattcagtggcatgtgcaagaatacaaagccacctagagacagaatcactgaagggtcttctctaacggagcagtgggctcagcaacccactgttccttcagttctcaaaaatgagacttagctgctgccgtgccttacattaaaaaggtctgggccttggggcaaactgagtcaatgtgaggcatgatgggtgaggatcgtgtggggcagtgggaaggaggtgtctggagatggctgtggccaaatggggaaggggttggcaggaggagagggggacatagcacacaccagtggtggagacagctcaccttgcagatttttgttctctcgcctcagtgtctctaactggtccaccacctcctcataggcattcctcatcttgaagagttcagtgctgagtgacctggactccttctgagcagcttccaactcagcctggctttcgtccagcttttgcttccactctgcaaggacctgggagatgacaaagggacatgggagaagcagaaagcaggggtgactcagaagagttcatgcaaacaagggctgtcagtaacaccaacgttttgcccttccatccttagggactgaagaaggaggaggagcactgttctagatcagggaccccaaactgtgatatccctgcagaccctctgctgcattctcacagacattataatctcagtggaacggaattagctttcactaaaaataaaattgcctttggagggactgtcacagtagtcaagaagacacctcaagtccctgaaactgggaaatgatgctccaactgggggccttctaggatgtgcaggtatctcacacatctaagcgtgaaactgttgttttcaccactgccactgcaaaacatttgtcccttttccaaattcaggtattttcatgtaaatagcatttccccaacttgaattatcctcatgccatcttcacaaagaaagcggctggggaaggaccttgtcgaagttcctctgcttcttgtccagtgtggcacaggcggtgtgggagcgctccagatcccgcatcagatcctccacctctccctgcagcctctgcttggttttctccaacgatgcgcacttggagttcgccgtctccgtgttctcctctgcttcctggagcctctgggccagttttttcctacgaaaaccagattttttttttccccttcgcaaaggtggaatatttcagtaggtaactgtcagatgggaagagaaatgaatagcgtggaagggactggtgtttgatgagaccaagacctaggatttggtgagtggggaggatccaagtgtcaccgagagattctcaaaatgcttggtggcaaagcaggtccctaaggagcacctccagggagctaggtggaatggacagttcccgagaagaaggacagggagacccccagagggtggggggtacaatccgagtgtttcagaaaccacaaaggcgtgggcaggaaagaatctctcaagatatgaagactcctggtcccttggcttgtgtcctcgggccccctctgctattgccaccctggagcccctacttggcctcctccagctcctctgtgcgctgaatggcgtccgtctcgtatttggtcctccactgggcaacctcactgttggccttggacagcgccctctgcagctcggccttggcttcctgctcctcctcatactgttcccgcagcaggtcacagtcgtggcgggaggactgcagggcgtgcgccatggcgttcttggcctgggaatgacagcggtgacaaattgcaaaaacatttgacccttttccaagttcaggtattttcatttaaatcgctttcccccaacttgaattatccctatgctgtcttcaccaattttgccatatcagcatatcacctggtttatttaattttttttcaagtggactccttaattatatttaaatatatttaacaaaagagtaaactgtcacaggaaagtaagtggaaaaccattgacatttgccataaacagaaggtaaccataagtgcaatggaaataaagcaatgttatcatgtctagctaggtactgttgcctgctgggactccatgcctggggtctaccctctatttcttaatagggtaaataagcaaatgctaaggaagtgtggttcacactgaggccttttccttgatataatcagaaggattggaacaattaaaaagggaataattttctcactacttgatgcaatggtatggaatgctgtgaccaggagaagcctgaaagcatcttttgatgtcaccactgggctatgtccccacactggggattgctgatgtgagcttcgctgtttccacggctggacttcctcctcctaggcagagaagacatgcctagaggcctccatccctcactccctcccattggagggatgtaagggcaacagtttagctccgactataatggccacaagacgccctctggtgccaccatcaaagagagagttctgtcagcccacttcagtaatttgtacattttcatctttttaaaaatgcaatagaccaagcgtggtggctcatgcctgtaatcctagcagtttgggaggccgagatgggcggatcacctgaggccaggagtttgagaccagcctgatcaacatggagaaaccctgtcactactaaaaatacaaaaccgggcatggtggcacatgcacgtaatcccagctacttgggaggctgaggcaggagaatcacttgaacccaggaggcagaggttgtggtgagccaagatcgagccattgcactccagcctgggcaacaagagtgaaactccatctcaaaaaaaaaaaaaaaggcaataaatgacacactttgcctaagaaggaaaactcagctgttgctgtattcttgccaaaggacagcccgctcctgcagtggctcttctcagtacttgttcaggcttgggttctcaccacttcccctttcccctcatctaccaaagatctttaccatacaacagaaagatgggagacaaatatggcgcttgtcctttttcagaagaaaaaggtggagcttgggaaaattccaaaagattgccctataagtcttagccagcgtacagcaacctcggaattccattcatgcagttttttggactcttagtcccctattctgatacttgaatatgaattggcagcaccaagtacctactgtgtgcactgttctgctaggcacagtaggtacagtggggacaaactattcttgccctccatgagtttatagatctgtggggagacatgtattataaacacaatatctagacattgaaatcaagaaggtgatgatgttcatgtttatgcgactgtctcaagggtgctcccaaaaccatggagccttcttggaggaggggagcttaaaatcaggtggtataggaggtgacacatcaggaataatgaagaagaaagaggagggggatttcaggtggccaggatgaattgctgggcagaatgatcaagtgtgtgcagtgatggggaggaggtgccctggctggaaaggggagtttctcagaccaccctgcgggggacagaggaggccaggggatggaccaccataggtacggttttctattcctgaagaaggagatccagtgccaaggtcctctaaccttaaaggacaggttcccaccatgctgcaaggcagacaggagaagcaacaggtttctttctttctttctttaatggagtctcgctctgtcttccaggctggagtgcagtggcgtgatctcagctcactgccacctccgccccctgggttcaaggaattgtctgcctcagcctcccgagtagctgggattacgggcacctgccagtacacccagctaatttttttttgtatttttagtggagacggggtttcgccatcttggccaggctggtcttgaactcctgatctcgtgatccatctgccttggcctcccaaagtgctgggattacaggtgtgagtcaccgtgcccagctgcagcagatttcttgatgtagcactgctctgaccagcttcacgggtgaagtggtcatatagcctggcttctcaggttcaatctgactctatatctttaccttggtttcttcttccatttgcctcttaagctcctccagctgctgggtgagggcctgcttgcttttggtcagctgtgaaatcagagactccttctcttccactcggtggctcagctcccctaccaaacagatgtggcccccacgtcagtgttactgaccaccctctcccatggcccggctggacccagagccctgcccattctcaccattttgggtctgcagtcttgctttctgcatgttcagatcatggatcaactgtgtctgttgctcgtccttggctttgatttcactaaattgatcttctaccgtccggcacgttctttctatgttactctttaacaaacagaaagtcaacacgaatgggaagaaatggattcctagtgcccagcattgaactgaacagtgtaatcatttagtttcttgtcaggtaaaataaaaataaaagtacagaacaaaaaaaagttcagtttcaaaaaaatcataatcggccaggcgcagtggctcacgcctataatcccagcactttgggaggccgaggagggtggatcacctgaggtcaggagtttgagactagcctgaccaacatggtgaaaccttatctctactaaaaatacagaaattagccaggcgtggtggtgcatgcctgtaatcccagctactcgggaggctgaggcaggagaatcgcttgaactcgggaggcggaggttgcagtgagccgagatcatgccattgcactctagccttggcggcaagagtgaaactccgtctcaaaaaaaaaaatcataattatttcagatttgtgaatgcagctcaatcaccaatcacttggaacatcaggtagataagtatttaatgatttgtaaacaaccctttgagaagatgtcacttttaagtggatctttgggatcctcttgtaatataagtgattcgtgaataattgcaagcaatacaagcctgtgaatatttgcaagcaatatattcagatgacagtgttaagcatttcattcaataacacagaaggttccccatggtgcaggccgtatgaagagattcacctctctggcttccagttggcctgtatttttgtgaagtttgttcaaaacccttgtgtgtgttgacctttctctcctcctgctgctccataaaatagaaaataaaatgtatagagcatatgtttttctttagaatggtaagtatgagatggcagtggaggaagcagggacactaattccacgggcgtcctggaggagcttaggatctctttgagaagatgacacgcaaacatgaaggaatcaaagcagggagagttgaaacgcgatggcagcttgcaaggagaatcgtcaaaggggacaactgaaaaagcgttaagagacatgacgtgctgcttcccctggatgttaaaattgagaacagagagcagcacacggcaattctggagatagggaggctggagtgggggctgtttataggcatagtgtatgggggatgctggaggcccttcctacccagctacccctgcaggctggcctggctcgccgagagagaggtgtgggaggggaacatttacagaaccaagttcttagaggaagaaagaaaaccaagggaaaaagggcaaacacatgggaaagcaggaaagaaagagaaaaggagtcatcagccggagccagaggctgcagtcgcggagtgaagaagcaatcaaggaggcacagggctgcgtggacgcagaccctaaacactggcagcagggggcgctggagagaccactctagttctctgattcatatctcccttccttttctggacagatgccctgaccttccgggaaaccctcggtgagaggcccacagcctcgcttctagggtcaccactgcttcttccagtctagccaaacagctcctagtacagctcagagcaccctgcaaggagggcacgtgttaaatcgaggagcacacatgctccacgaggaattctttgctttgaggccatgcacagaggtgggttcactatgaagcttgtgaaataagcttcagggcccgcatttgcatgggccacagagagtctgggagctgcagaaggttcaagggaagaggagccatcacaagcagaatattctagaaggcatttctggcaaatggcccaaagaggcctcaggagaaaagaacttgagtcttcaaggtaacctgcgacttttttgtctcattttaaatatcaactttcatgcctaatttttataagtttgtatacttttttcttaaagagccccaatcggccaggcacagtggctcatgcctgtaatcccagcactttgggaggctgaggtgggtggatcacctgaggccaggagttcaagaccagcctggccaacatggtgaaaccccaactctaccaaaaatacaaaaattagccaggcctggtggcgtgtgcctgtaatcccagctacttgggaggctgaggcaggagaattgcttgaacctgggaggtagaggttgcagtgagctgagatggcgccactgcaatccagcctggggaacaagagcgaaacagtggtgccagatcatccaattgtgcttgaatcaagtgatcttgatgctttggtctgaaagtttgtgtccccccaaaattcataatttccagtccagtggtgttggggggtggggcttttgggaggtgataaggtcgtgggggtggagcccttatgaatgggattagtgttcttataatagaggcctgagagaacttgttcaccccttctaccacatgaggatgcaatgagaaggcaccatctgtgaggaacaggcctccgacagacaccgaatttgctggcactttgatcttggacttcccagcctccaaaattgtgagtgataaatttctgttgtttataaattacccagtctaaaatattttgttacagaagcacaaatggataagacaaaggacgtgagtaaatttgaggaactagaaacaggcagaaatagggaagagggtttcagtgtagaacatgcagtggtttggaggcatcaaattacacgtgcccaggggcaggtggccgtcggctgccttgcattctccaagagcagaagggccagtcaggtacctttgacttggagagagcctcgatgttgctggccatgtcgtcaatctccatcttcagctcgctcttctccttctccagcttctgcttcacccgctgcaggttgtcaatctgctccccaagctcggccacactatctgcttgcttcttcctcagggtggctgctgtggcttcgtgctgcagggtggcctcctccaggtccctgcgcattttctggaactcagcctccctcttcttgttcatctcaatctgggctgaagtggccccactggcttcttccagcctctcgctgatctcctccagttccctggccagatctgagcgctgcttctcaatcttggctctgagcgtgtgttccgcttcaatttcctcctccagctcttctatgcgggcctgaaaggattactctatcaggaatgttattgtggaggagggggcagccccctttgagaggggctgggtgttgaggaattgcgggtaggcagcatgaggtgggtgggtcatttgaggtcaggagtttgaaaccagcctggccaacatggtgaaactccgcctctactaaaaatacaaaaattagccgggtgtggtggcgggcgcctgtagtcccagctactcgggaggccgaggcaggagaatagcttgaacctgggaggtggaggttgcagtgagctgagattgtgccactgtgctccagcctgggtgacagagcaagactcggtctcaaaaaaaaaaaagaagaatacattataacattaaattggtgaaaaaacttggaaacaacctaagtgtccatggataagagaatgcacaaatcgattgtgatggagacttgttctagaagtctatggagcaggtagacacaaatccacgtctatcatggatagctctgcagatcatgttgccaaaagaaaggagcaaattgcagagtgatactctcagtgtgatatgctaagaatatgaagaaacaagaaccttttctgcatgtgtactatatattttttggggagtcttaaatgtgtacaaaaacacatagcaaaagaggcagaaagatgcacatcccagtgaaattggcaattaattctcagaagacggggagggcactgggcttagggatggcgatcaaagcacccttaacaataatatttagctttactgggcctattttgagcctttgcaaggaagtatgtttatgggttattcagaacattaaaatattattttcaaaaactaaaggaaatgacaggacatcttctctagctttagcaggaggaaggaaagaagcagctaaagaaacaagggggaaggagtgaggaggggcgctcttgcaaagggattgtcatgattgggaaggttttgatgcttttacttgcagttctttaatcttcttttgaaactgcaaactgtggacttgttcgtcatctattttggcttgtaactgactgagttcaaactccttcctgcaaatagattaaaaaaaaataaagaacatgaaatacaagcctcttggagggggtgaaagttggcttttaggctgagacacagaggtggtaaaagaaatatctactttttcaatttctcttctatttgctgcttgtcattttctagatccataatggattcctgggacattttcagatctccttccagcttcctcttcgccctttccaagtccgcccgcagtttcttctcctgctctaaggaaccctcaagctgagaagacacacaggtagaaaattaagcccctgctggggaagtgtttgccccgtttatccagtgtagccatacacgtggcctggggcttcctggggctcctgtagggtgctggctgcaagcctctggccccaggaggaagcaagtcttgcccctacctcccctctcttctgtcttccagaaaagactacccagggtggggctggatccctcaggggcctcctggtgcctctctcagctgattcccacctggcctggcccagactatgttccctgtaggggtatggtacccatgggtgcacactcttgcacagacaatacaaatgggggcttctgtggacagcactgtgaaggtctgtgctacacaccatcacgccttgcctgctaacattatgcaaccatgggaggcaaggaattcgtgtgtgtgtatgtgtgtgcacatacacacatgcatacataggaacaggaaaagggtgtagaggaggagcacacctaccctgggctcagaaacattaaagttatctagaaaatctctagccacaatagtgagtaaaacctgaaaacttcaaacgtggctcttacatcaagaacaataatgtcatgtgacgggggcagaaatagtaattttcatggccacaaatggaactcatctttagtaacgttacaacaggattggaggttttggaacccaaaggacctacaagtggatgctaataataatgatgatggtgatgatagcaatagtagcagctatgttttactgaacactttctgtgtgctgagctttctgtgaaaaccctctgagatggagctatttacatcgccatttcacaaggcacaaactgaggctttgcaagggtaagcagcttgctcagtatcccagactccttcagggtcagggtggggctgagatctgaatttagggatgctgattccagagtctgacctctcaagccctgtgtcctagttagactgtctcttgtctgtgcttccacaagtgataaatgctaaagcatagtagtaaaatatcctcacatcatctgtttgctgttcaagcttggcatttattttgattagaccattgactttatcttcttccacctgaagatcatccagtgtttgctgatgggcctcctgtagagatttcttttctttggtcaatttggaaatgttttcttcaagtgctgtcatttcttcggaaagattctttacctgggacaatattaacaccgatttaatatggaaacgattatgccagaagcttccatcaacaaaagctattgcttctttgctcatttttcctttttcccttttctttttggctactacttttttacctcctagaattgacagactctcagttctttatcttccttaacggtctatcatggtgcctcaaattctcccattaggattattcatttaaggagggcattatattttacaaggaagggcgcttttaaaatgcaaatgtgctacctctgaagggtaaaacatcaatctatattcgctcataatatgtctgtggaaatgtgtttgttaggttggctgaatagggtttagaatgaggca[147 bp omitted]cctcgtctctactaaaaatacaaaaaaaaaaaattagccaggcatggtggtgggcacctgtagtcccagctactcaggaggctgaaacaggagaatcgcttgaaaacaggaggcagaggttgcagtgagctgagattgcaccactgcactctagcctggtgacagagcgagactccgtctcaaaaataaagacagaaagaaagaaagaaaattcagaacgggagtgctgtgttatcaggaagcaggaggagggcacccaacacggaacttgaaggaagtaagtgaaacctttttccacatccaacaggcttccagatcagaagttgctaactcctaatctatgggctgaatctggccatattttctttagtccacatagtggtttacaatgttatcattt[131 bp omitted]cctc[171 bp omitted]cgcacctggccctatatttcattttcttacatttttccaccgtttagcagtaggtatttaatatttggtgtgcacacgccattgctcctaatggctacgtagtgctccctgctgtgttatctactacattttagttctccgttttccccgtggtggaccctggcactgcctccagctgtctcccgcaagcaatgccactacaaacaccctaggacatgtcgccttatggacaggtggaagaattccttgatctatacacccaggagcagaattgctgggtcgtagggtatctggattcttaatttgactgagtaattccaaataactttcccaaaggctgcatcagtctctgtcctgccggtacccgctcctctcagtcaatccttggtgttatccagtcttctgcctccttcactatctgcctgacccctgtaggccttcttgtttgcaatccctgtgcttggtgctatgggaactgaagaagaatatgaaacagtccttcctctcaaagaaatgctagaagtttgtgatacagccagggagggttgagaagagcctatggggccgggctcacacctgtaatccaagcactttgagaggccgaggtgggtggatcacctgaggtaaggagttcgagaccagcttggccaacatggtgaaactccgtctctactaaaaatacaaaaaattagctgggcatggtggtgtgtgcctgtaatcccagctacttgggaggctgaggcaggagaattgcttgaacctgggaggcggaggttgcagtgagctgagatggcaccactgtagcgagatctgcctgggcaacagagcaagactccatctcacaaaaaaaaaaaaaaaaaaaaaaaaagaagaagaagaagaagaagaagaagaagaagaagaagaagaagagtctatgggtagaaaagacaccagaggacagaacttgttgggacttaactacccttcaccttgacgccagcctctcatttctgggcaatgttatattgactggactcctacgccaccctttctcctccttacagagagagagagtgaagcctgttaagacactgtgggagtcccttgggtttgctcaccttgttctctgtggcatgcttctccttttcaactttcgtcaaggtcagctccaggtcatcaatgtctctcttgagagaggagcatttatcttccagattcctcttcttggcaaccaattcagaattcatctcctcttcctcttccaatctctccgtcagctccttgacttttgcttccagtaggatcttgcttttgatgagtccttcacaccgttcctcagcgtccatcagattttctgtttcctgaaagaaccaggtcattttatgttttgattggcctctttgaaaatgctacaaagaaagggtatcaccctctaaaagcttattatctacacctaagccaagaaatgggtcatgcacacacatgcacgcacatgtgcacacactgcacacacacgtgtacataaacttagatatcacccataaacacattttttctttttagatggagtttctctctgtggcccaggctggagtgtagcggcatgatctttgctcactgcaacctctgcctcccaggttctagcgattccctgcctcagcctcccgagttgctgggattacaggcatgtgctaccatgcctggctaatctttgtatttttttgtagagatgggattt[135 bp omitted]ttttaactagcaagaacattgcttatagaaatttgcatataataatttgttcatttatttctttagagacaagggcttgctctgttgcccaagctaaagtgcagtggtgtgagtgtagcccactgcatcctcacactcctgtgctcaagtgatcctcccacctcagcctcccaagtagctggaactacaaggtatgtgccaccatgactggcttcttttttggtgtgtgtacagatggggcctccatgtgtttcccagcttgtctcaaactttgagcctcaagtgatcctcctgcctcagcctcccaaagtgctgggactacaagtgtgagccaccatgcctggcctcacttataataatttcaaacagaggagtttgtgaaattacaagttcattttaaagaatgaagcctctagaaatttgccacatttgaacagctggttatctcactcttcctgctaccaccagttggaaaatgactcatctactctatgttatctcaagctgacaaaatagtttcaaaacattactatcttttaactttcattaaatttatttttaaatatatggatttatttattttctagagataaggtatcactatgttgcccaggctggtctcgagcttctgagctcaagtgatcctcctgccttggcttctaaaagtgttgggattataggcatgagccaccaggcctggtcctttcaacagaaaagttctacctatgtctccttagctgtgtctcctcgaaccacagaacagaaaattaaaaacacccaagaattcgtgattgaatacatatgtcccagaagatgctgcagtgagtctcttggacagaccaagatcagctacttctgttctaaatcgggctatatcttcccatataagaatatttatttatatatttgtttatttattgagacggagtctcactctgttgccaggctggagtgcagtggcgcgatctcggctcactgcaacctctgcctcctgggttcaagtgattctcctgcctcagcctcctgagtagctgggactacaggtgcccaccaccatgcccagctaatttttgtatttttagaagagagggg[146 bp omitted]atgggaggagactggcaagcctgcatgctaatgtttgctgaacatctataaacatgagctgtgtgccaggcattttacaggcattaaccactctgatttttcaatagctggatgaggtgagtactctgactatgcccattttacagacgagataacagaagcacaaagaggatatgtagctcatccaaggtcacacagctatcaggtggagcatctgggatagaaacccagttatcttgttccaagagctgttctcttgtccgctgtacctgggaaagtgctcctattaactcactatagtgattgggaaagtgaaaaggggagcggaaaatgctctgtataaaaacaaaaggtaaaagtatttggggatttattaaaaagggaaaattataaatgccttcactctgtgaaagagacaattatactgccccatttcttttctttttctttctttctttcttttttctttttttttgagacggagtcttgctctgttgccaggctggagtgcagtggcacgatctcggctcactgcaacctccacctcctgggttcaagtgattctcctgcctcagcctcctgagtagctggcactaccagcgtgtgccaccacacctggctaatttttttttttttgtatttttagtagagacggagtttcaccatgttagccaagatggccttaatctcctgaccttgtgatctgcccgcctcggtctcccacagtgctgggattacaggtgtgagccaccgcgtccagcctatactgccccatttctttgataaaactatgtatctttaaagcactttttttttttgagatcggggtctcactgtgttgcccaggctggagtgcagtggcatgttctcagctcactgcaacctcgactacctgggctcaggtgattctcccacctcagccttctgagtatcttggactagagacatgcaccaccatgcc[367 bp omitted]gccatgatacccaggctggtcttgaactcctgggctcaagcgatcctcccacctcagcctcccaaagtgttgggcttacaggcatgagctaccacgcccggcctaaagcactttttacatattattgtaaataatatatagaaaattactcttgctactttgaattgggttatttaattttgattatttttatttttattgatttttaaaagctgtggtgcatatacatatgacacatatatatccctcatgcccacagcaaaatatatctaactctgcgatgacggggagaaatcagggagagcacaaattctctttgcagacataatttccggcattcactgctttgctaagcccgggaccaggcatccttttacgagcaaggtggtgctgcaatactccacatgaccactgggtggcaccactgtctctcgaatagacacctgatggcgccctcaatgttcctcccccttttctgtcctccagagtctgtgttttgcgttctcaagtagaaggtacttacagactggacctgcaattggaggtcattcttctcctgcaggagggagaccattttctcctccagctccttccggcgagcctcagatcgggccagttcttccttggtcctctcaaagtcttccttcatggtggccatctccttctcggcctctgcactcttcagcaggggcttgattttgaagaacaggttcatccagggccagtgcttgacgttcataaaagagcggatgttgtactggatgcagaagatggagtccctgtacacccattaggactcaaattaataaatccagcaaggtctggtctctgcacccccaacctgtccccgacggaccccatcctccgtctttctcggttaggtgggaaggaggtgcagccaagcttggcagatcctctggatccagagtaggtctgcaaatgaggggcagaggaaacagaggtacgtgcacaggttggaaggtaggagagggcgtggagctacctgcgggctcctggtcacctggctgcccttcccaccaccctactgagagtgccctgcctgagggcgtccgtgacctcctaatgctcaatgcaaggaatagctttcattcctattctattgggtctttctcccatgtttgatgtattaatcagctcttaacttttgaaactttctctgccttaaattccatccacattttccctgtttcactgcattttgccatatggggttcctcttcctgctggagaaacccaggacttgtccttggtcatttcccagtctcttgccctggtagagttgatctgtcttcccaatttctttcttttctattcgtttttttttttttttttgagatggagtcttgctctgttgcccaagctagagtgcaatggtgcaatctcggctcactgcaacctccgcctcctaggttcaagcaattcttctggctcagcctcccaagtagctgggattacaggtatgcgccaccacgcctggctaatttttgtatttttagtaaagactgggtttcaccatgttggtcaggctggtcttgaactcctgacctcaggtgatctgcccgccttggcctcccaaagtgctagggttacaagcgtgagccaccacaaccagcctgtattcctaatttctgctgctgttttcatcccagtgtcacccacatgatctcctccccttcaccctccacagctttatatttacatagcttatggattcctgaacactggcttctctttcccttcttgagattcttttcatctccgtgctggcttccatgtgcttcaccaagctcgatgcctgggagtgattcctgacgcatacatggtggcggttcattatggctctgacagttagagccacacaggggatcagggaaccagggagaacaggctccctcccacactcccctctccctccaatccctgcaggtgactagtcatcaatgctgctattccttctcttgaattatcaaaggaaaaagacttaaacattcctttaatccatgccctcctctctcacccatcaactatgtcctacttcaggtccttgtcatcccttacttggacttctaccacactgtggccttgccccgtcatagcctttgtgttcactctcctagctgccagagtgatgcaatcctaccccttgtctctgcacacaccttctacagctctccatcaatgacagggtgcagcctgggtttctgaatgtgacacatagggacctccactacctgcctcttgctctctattccaatgacagccacctgcttgtcgggcttcctcccagaccacccactctcaggttgtgtagagcttgcttcagaaagtgctttcgtcagctgggcgcagtggcttacgcctgtaatcccagcaatgtgggaggccaaggcgggcggatcacctgaggtcaggagttcaagaccagcctggccaacatggtgaaaccccatctctaaaacaaaacaaaacaaacaaacaaaaaacaaaatagccgggcgtggtggtgcatgcctgtaatcccagctactagggaggctgaggcgggagaatcgcttgaacctggaagctggagattgcagtgagccgagattgtgccactgcactccagcctggatgacagagcaagactctgtctaaaaaaaaaaaaaaaggaaaaaagaaagtgctttcttcttgctgacaccttcatgccaactccaaccccctaatcaggctgggggcttattcttgccagttccctatcccccgactataactcgaacattgagcttgtcacaggcattaaaaccagccatacatgcgtctgcttcccactcctttgtgaccctgtgagggagggttcatttctgtctccccagcgccatgcagagcacccagcccaggattgccgctcagtagatgtgggttaaacaaatgaaggaaagagagcaagcacatggaaatcccaagactaaaagcaggaagtgacaatcagctgctaagcagagagggcaggataaggtggaggtgagggtctgtgtcacctcctctccatcatcttcttgaactccacccgcatcaggtaccccctgcacaccgcctgcgtgcttgtcatcagcgtcaccagcttctcatctctcatctcctccaaaagtcccaggagcccagctttgaaaaacacctgcattaaaagacagaggagccttgatctttttccccagcaggcgttcagccgggcccttgagggggcctgtttctgctcaactctgaggctcaactctcagagcacggcaggggcagcaattctgtttccaggacttgcttctcggtggctctggtctcctcagtggctcctcctgggcagtgaggcagcctggtccagagtctgttccaagctggtcatggtggctcatgcctgtaatcccagctctttgggaggccgaggcaggtgatcatttgaggtcaggagttcgagaccagcctggccaacatggtgaaaccctatctctactaaaaatacaaaaattatccgggcgtggtggtggggacctgtaatcccagatactcaggaggctgaggcaggagcatcacttgagcctgggaggtggaggttgcagtgagcagagattgcaccattgcactccagcctgggtgacagagcaagactctgtctcaaaacaaaacaaacaaacaaaacaacaacaacaacgacaaaaacaacgtgtgttccaggccccaccaacccacagagatcagttctgacagagctcacatacaggaaacaaagatgagtccagaaagaaaccatgggacgcaattgtgcccagatcagagagattcacagatgcgttggcttcaccctcttcttctgtccatctgggaaggttggtcccatgctcaggcccacttcgcccactccctccataacattccagggaaactaagcaccctctggggccagcaggctcttccttgctggagacccccagcctgcccgtttctgagatgtggatctttggaggcaggccaggatttgaagctgacctttgccacttactatctatccatgtgtgaccttgagtaagtttctcgacctcccaagaacctgatgagtaagtgccacccttatcaccatcactcccacctcgctggttagtgaggagtcagtgaagtacgtgcaggaggcttctcacagggctgatactcacgtgctcaataaatggcagctagtttgtctttgtttttgtttttttgagacagggcttcactttgttgcccaggctggagtgcagtagtatgatcaatcgcactgcagcctccatctcctggcctcaagaaatcctacttcagcctcccaaaagcatgggattaaaggcatgaaccactgcgccccgcttggtagctgattttattgtttatagtcattctcctcaaggcctcagtgtccctggagtcctctctatgttctcctctctcttcagctctttcttacctctgggacactagagttccccattggcttttcctatccttgctgcatggtggggctcaggcttccaatctaagctttcagccacttacaaaccaacagggagacaagctctgtctacctagacacagagctccccttacctgggcgactgggcaaggacggtcaggtggaccaaaaggagaaggggaccctttttctgatcagctaagaagcagcccagggctgtggggttactaggggagtcccagccttgcctgtgctcaccttggtgttgccgaacctgaactgctcccggtccacatcgatggagttgaggagcttctctgaggcatttttgctgtcaatgaactgcccttcagggatagcactggcattgaggatccggtacctaaggagagaggacatttcccaaatggattccaatccccgaaaggcttcatagctgagaccagccttctagaatcttctcctgctcaagccttaggaggaagtggaatactgtacagctggtctgggagatgggaatagctagggactgattctagcaagggggcttgaatcagcccccttgggagagaagcaaggtgggtgggagagaagcatgaaagaagggagcccagctgagtgcatggcgggaagtttgctttcagaggaaatggttcttctctggcttaaaagaggccttgaaatcaaccgtgacctgtaggccgtggttctcctacttctggaaggtcctctcctgtcctccatcctggacaaggcccggacttgtgcaacccaatggtggctcagaggagagagttagtctagagctgcgggcctcagctgggtgtgatttggcaatgtctagagagttttgattgtcacagctcagtggggaggggtgtggtttgctaccacatctcttgagtagagggcagggttactgctaaaatcctcccacacccagcacagcctccacaataaaggatgatctagcctgagtgtccatagtacagaagttgagacatcctggtctagagtcacaatcaggctagagggtctgggatctgaatttggaaccacttgggctggcccactcactgtgggcatgggatcagttcctctagcaagagatgaagtctgtggaaactctgggggacttgggagctcaccaaatacccaggtcaagaaatgtcttagggaaatgcaaaaggtgccctcggaaggagagagatgcacaggagagagggaacctaccgctgcttgaagtcagcatagaggatccggctggggaatcccttcctgcaaatccggatgccctcgaggaccccgttacagcgcagctggtgcatgaccaagtagtggtccatcacacctggagagagaacgtcccgggggtgtgcctgtgaccccttcatttgttgttgatggtctgaggcaccatgagaccctccaacacatccacacttgagtgggagagtcagtgagtgggagagtcagtgccagctccaaggtagagggctgggggtggctagagcctgcctgcaggtcccgcagtgaaataatcccaccctcttggggagatgctagcaccccataaccgtggcagtaagagccaaagcattgtgctttctgtcctcagccctgactctgcagcaaggctgcaaaagctgcagagtgagtacagggtgcacttgggcttcccatgggataacccgagatgtcttcttgcatctacacaaagatggggatggaaaaatctgcaggctgtggctgcagaagagtaacccagcaaagaagaggaggccggctgggcgcggtggctcatgcctataatcccagcactttgggaggccgaggtgggtgtatcgcctgaggtcaggagctcgagaccagcctggccaacatggtgaaacccagtctctacagaaaaatacaaaaattagccagatgtggtggcacacacttgtaatcccagctacttgggaggctgaggcagcagaatcacttgaacacaggaggcgggggttgcagtgagctgagattgagccactgcactccagtctaggcaagaagagtgaaactgcacctcaaaaaaaaaaaaagaagaggccgtgggaggggacccagaagggggttgaaggtagggcggcggtcatctgctgaccactcagcccctgctataggaattgggggagaaatggagcttggctggaaggagaggagctagaggggcaagcccctttggggaggtaatgtgggtgctcgtggtaaccagcctgggtcaggcacaaatcaaactaggatggagaaaattctgtctcaggtctgcgtgaggggttagaggacaggggctacggcaacctgatggcttctctttgtgggctccctaagttgccggggtgggagtggtggggccaaggctggctttgacttaaccttagggaagcttctagaatgcccacgtggttccctggtagctgtggggagacatcactatacaattagatgatttttaaggctttggtagagctgcactgtcagataccgtagtgaccagccacatgtggctatttacatttaaattcattaaaattaaaaattaattaacattttaaaacttttcatgtaaatgtaaacatttcatgtaacggtggccaccctattgaacagtgcagacatggggcatttaatcatttctgaaagtcctatcaggtggtgattctctagagaaaacatggttgagagcaaggagaaaatgtctcagacattcagagaactggccaggtgcagtggctcatgcctgtaatcaccgcacttgggaggtcgaggtgggtggatcacctgaggtcaggagttcaagaccagcctggccaacatggtgaaactccatctctactaaaaatacaaaaattagccgggcgtggtggcaggtgcctgtagtctcagctactcgggaggctgcgtcaagagaatcgcttgaacccaggaggcggaggttgcagtgagccgagattgtgccactgcactccaacctgggtgacagagcaagactcagtctcaaataaataaataaataaataaatacaataattaaaaaattcatagaaccgccgatgtggagagaaccttagcaatggtctaattcgactcccatgagctctcagatgatgattctgagtggttaagatcccagctatgctgtttactagcttcgcggacttggcctgtctctgcctcaatttctttatttgtaaaataaggataataatgtaggttgagcatcccgattcagaaaactcaaaacctgaaaacttttgagctccaacctgatgccacaagtggagaattccacgactgacctcatgaggcaggtcgcagccaaaactgtttcacgtacaaaattatttaaaatattgtataaaattaccttagggctatgtgtataagacccatatgaaacagatgaattttgtgtttagacttggtcccatccccaagatagctcattaggcacatacaaatattccaatatccacagaaatttaaaattcacaacactcgtggtcccaagcatttcagataaagggataatcaacctgtagtatctgcttcatcaggtggttgaggattacatgagttaagatgagtacaggcccggtgcgatggctcacgcttgtaatcccagcactttgggaggccgaggtgggcggatcgcctgaggtcaggagttcgagaccaccctggccaacatggtgaaacctcttctctactaaaaatatgaaaacgtagctgggtgtggtggtgcgtccctgtaaatcccagttactcgggaggctgaggcaggaggattgcttaaactggggaggcagaggttgcagtgagctgagatggcgccactgcactccagcctgagcgacagagtgagaccctgtcttgaaaaaaaaagagagagagagaaaagatgagtacaaaggttaaaatggtgaaagcaggcatgattaacacttgctttaaccatgtggctgaggcctctttcttcttaagcaccgggagcagagagaaaaaggcatagttacaagagaattgaagcttctagagccagaagaaagctgaaaggaccatcattttacagtggggaggccagagatgccaccatgcttgccaggctgtccatcctgttaggggtcgtgtccgacttggactgggagatcttttctaattcccgcagaggcatcctatggggtggcggggcactgggggagactgaggcccagagaggtgaagggctttgcaaagctgtagcagagccgagacgccactcttctctctcacagggcccctctggtttgtgcagactcagaatcctgagctgagttctcttagggcttgctttgtttttccttaaacccggcctgagatgttttctatcaggtccacgtaaagggcctcctttgcttttgtaccaatgcgtaaaacttctaaaaattcccctgagctattctctcatccttctgctccagccgctgaagggtttttcctctttatttctccaagtgtatcacttccatcccactcctttctccagccatcttggcctctgtgggcagtggtattagccatgcttttgaaatatgctgtatcttatgatgatccggcatcatggggcctcctcgctggctcaggagagactgcccttcccggggctagccattccaggagatggcaaaaaagcctcctgcaagcacgtctttcacatgcaaaccagccatccaaagcccttaacccccgacccctacctttatcaggctctcacagggctcttacactctgggccaatacttccctgtcctggtcacctcagggccccaggtaccggccaacttgagaaagtccctacattttgaagcctgctgaaaccattcaaacttggcaatgctgaacctgcttggcctgttcatgctacctcgcctgctccatcccatgggaatgaccctcgaggctctggcctgtgatttctccttactcccccaaccccaaacctagctctggtgcttcccctcgtggccctctgtggcaggccccctcctcttgagcactgtgtcttttttttttttttgagaaggagtctccctctgtcactgaggctggagtgcagtggtgcagtctcggctcactgcacccaccgcctcctgggtacaagcaattctgcttcagcctcccaagtagctgggattacaggcatgcaccaccacgccaggctaatttttgtatttttagttgagacagggtttcgccatgttaggctggtctcaaactcctgacctcaggtgatccacccacctcagcctcccaaaatgtcgggattacaggcgtgagccaccatgcccgggcgtgactgtctttttaatggtaaccatcttctggtctgttggcctcaccatcccttaacaataataaaacctacatttaaaaacagcagcaagccagcttttggtgagtcagcagcacagacttagcaggctccaggtttgctgcaagaggagaacgagaggagtagaggctggagcctgctcccgaggggcccttgttcagcaggcgagcagaggacctgtgcccgtgaagtcctagaggatttgggagaacaactagcaagccccgtatgtgcctgtgggtggggagggacttgagatttgatcatggatcgtgactcccagcccctgctctaggtgccctggggtaaggcatggaaatctccatagtctctagtcttctagaaaataaagagggcacactagctgctttctaaggtgtcaccaggcttctgtattcgtgttgggctattcccagaaattgacatgaaaacagagaggtaggtgccagagctaaggagaagcaaatgcaacaggaaagg[187 bp omitted]tgatgtgtgcctgtagtcccagctactcaggaggctgaggcaggagaatagcttgaaccagggagttggaggttgcagtgagccgagatcgtgccactacactccggcctggcgacagagcgagagtctgtctcaaaaaagaaaaaaaagtaagccagtggattaccaaaagcattcctcccagaggcacagtttgaagccatcccccaccaccttgcaggccatctgcttagagaggagtcaggccacaagcatgtttgatttatgcaaacatgtactcaacgacgacagtaacagaaatggatattttccaagacctactacaagccaatgatttcgtgtgattcttaaccaaagaaaccactcttcccaacactggagaagccggctcattggtcaggaggctgcaggatgccccagataatgcatatatcacaatgatgtagttggttattgcttttgacttagactttagaacctaactttcatggaagatgcagtttcactaactataacacacctggctattggggatttaaagtttatagttctgagtgataataataataataataattagcatccaacatttgctgggtgttcacaatgtgctcagccctgttgtaaatgcttgacttgcacttactcattgaaccctcacgacaaccctctaaggtgggttaaatgagctaatatttgcaaagtgagtaaccactttatgagtgcttattaaagaagtaaataatagattaaaatgccacttttatccttgttttttttttttttttgtttgttttttttgagacggagtttcgctctgtcgcccaggctggaatgcagtggcacgatctcggctcactgcaagctccgtctcccgggttcacgccattctcctgcctcggcctcccgaatagctgggactacaggcgcccgccacc[184 bp omitted]gctcaaatactctgcttaggatcacgtggtaataggtgaacttttcccccccaaccccccgacaacgtatacctctgttcactcataatgttgcagaggcagaatgtttaatcctgagctgggaggcccgtgttgggcatagaacagctcagctggtgagttagctaccccatagccacagctccgtgtgacagtttgttttcctttttgtgacaaatgacactgaaaaagctagactccaagaatattcgcaaatcaggatgaagtgacagttaaaggagtcctctattgcacagggttctatatttatatatagtctgtattgcacagggttctgtatttatatatagtctctgattctcagttttctcatttataaactggagatcaatacgcgtatcttgcagagaactgttgcaaggattcgaggtaatataacaaagtgattgacatgcagtatggcttcaaacagttgttattgatgctattttgattatgggatacccaagatgattatttgccaaatgtagtggtatttaactttggggtaaacagagcctttatcttatgaaagctgtggctctgatgtgcctatatacatacacacaatattttgaatatgatttcgtagtaggggtgccagataagatacagatgccctgctgaatgtgaatttcagataaacaatgaatacttttttagaggaagtatattccaaatattgcataggtcacacttagacatttttcattgtttaactgaaattgaaatttaataacatttaatatggcatttggtttttagcatttttgtggttacataatagttgaacatatttatggggtacacatgatattttgatacaagcgtgaaatgtgcaaagatcatatctgcataattgggatatctgtcacctcaaacatttatcatttctttgtgttgggtacatccggtatttttatctgctaaatctggcaaccctatttcagagactactttcagaagtgatacagaccatcactctttccaaacgcacacccacagaattttgcatttatctcagggcgtcctgttctgttcaaatacttggcaagatctgctggtactcaccaggagtcttggtctcattgggaatcagacatcgtacaaagtgagggtgggtgctccttaagttagtcatcaatttgtttaaattttcctgggacataaaccaaaacaagcacatttagcaactgccatttcactggggagaaaaacaagtgaatatggaagctgccaaaacaccaaccctgaacacggccgacacggtctggaaagaggagcccttcttcttcccgcccttcttgcttcctccggagtcgcctggagacagacacagaagagcgtgttagatgcatcccagaggacccagcagtgggcttcctgaaccacctgttcccagccccgagttctggtttccttttgacataagagacttgaggttttgtttgtttgttttagacggagtgttgctctgttgtccaggctggagtgcaatggcaccatctcaactcactgcaacctccacctcccgggttcaagccattctcttgcctcagcctcccaagtagctgagactacaggcgtgtgctaccatgcctggctaatttttgtatttttagtagagatgagatttcaccatgttggccaggctagtctcgaactcctgactttggcctcccaaagtcctgggattataggcatgagccaccttgcctggcctgtttgtttttaaaatgcccccaaactacccaggattaagaaccctcagctttatcattgtgggaatggggtgggaatggggtgtggatagcatttaactgggagtataacttaaactctcagtagaaaaggggagtcctttcctttagaaatcagagctgaaagcaaactgaataatttgcaagattgagatgtccctcttaatgtttgtagtttctttttttttttcattctttttgttgttgttgtttgtttgttttaagatggagtctcgctgcgatgcccaggctggagtgcaatggtgcaatcttggctcactgcaaccttcgtttcccaggtttaagcaattctcctgcctcagcctcccaagtatctgggactacaggcgagcgtcaccatgcctggctaatttttgtatttttagtagagatgtttagtagagagtttcaccatattggcc[132 bp omitted]ttaatccctgcttatctctaaagagtaagtaactgaaagtaataaaacggaattttctcaacaatattttataagttgatttctttttctttcctacaggaaacaacccaatttgccatcttaatttggagtctactttttctgaatgactcagttttctctgatacttaatcaagatgcagccttgggggaaaatgtcatgtcccagtctcccccatgttcctttcccttcatcccactttgtccccggggtctagcatgactgtgtgtttggattggggaagtgaaggcaggaaagtcgcttccccaaatccgcatccacacagggtcttatgttagagttgatgttatctctaggcgaggttatgcaatgtagttacagagacattgtgattagattcaaagaaaatgattttcatcattgaagtttacgcatgtgcccatttcctatttattacattccctggcccagaggacattaggctttcatttttaaaaaatgatctcattatctaatgaataattatatttcatatattttattaatttattaaatgtatgcatttaaaatggcatataatgttaaaactctatgttggctactatttaaaagtatatttactggtaatcttaaaaagtgttactggcttgtgttacttatttatttgtttgagatagggtctcactctgtcatccgggctggagtacagtggcccaatcatggctcgctgcaatttcagccacccaatctcatgtgatcctcccagctcaggttcccaagtagctggactacaggtgtgcaccaccacttttggctaattattttattttatcttattttattttgttttagagacaggatctctatgttgcccacactggtcttgaactcctggcctcaaatgatccttctgcctcagcgtcccaaagtgttgggattacaggtgtaagccaccacgcctggcccctgtgtaaccactctggaaaagagttcagaagttactcaaaattttgaacacagttatcatatgacccagcaactctactcctaggtaccgtatatatataccgtgtatacccaaaagaattgccaatatatattcacatataaacttctatacaaatgttcatagcaacatcatgcacagtagccagaaagttcatcggctgatgaatgtgcagacaaaatgtgatatattcatacaatgaactattatttgtccataagaaagaacaaagtcctgatacatgctacaacagggccagaccttgagaacagtaacctgaaagaagccagacacaaaagagcatccagtatataattccattcacatgaaatgcccagataggcaaatctacagggacagaaagttgatgagtggttgccagaggctagggatagaaatctgctcatggggacaggcatgatggctcgtgcctataatcccagcactttgggaggtcgaggcgggtggatcacaaggtcaggagatcgagaccatcctggccaccatgatggaaccctgtctctactaaaaatacaaaaaattagccgggcgtggtggcgtgcgcctgtagtcccagctacttgggaggctgaggcaggggaatcgcttgaacccaggaggcagagc[135 bp omitted]gtgatggtcacacaacattgtgaatatcctaaaaaccactaaatttttttttttttaatagagtctcactctgtcacccaggctggagggcagtgatgcaaactccattcactgtaacctctgcttcctaggttaaagcaattctccggcctcagctgcctgagtatctgggactacaggtatgtgccaccacactcggctaatttttgtatttttagtagagatggggtttcaccatgttggccaggctggtctcaaactcctgacctcaagtgatcggcccccgccttggcctcccaaagagctgggattacaggcctgagccaccatgcctggccaaaaccactaaatagatttaagggtgaattttattatatgtgaattatacctcagtagaaaactattaaacaatgtgatgttgactatcttggccactgagaggtcctgtttacctccatagagcccagtctcttacagaagaggaagaataagagcaggaggaagaaaaatggagctgaaagagaaacatcatactcagctgaagctcatgtctgattactggttcttcacaagcagctctgggttaggagtcattacatagaacgtcccacagagggaaagaaatgatagaattttacctgtctctgcaccagcatagttggaaaaaaggaaggagagaagcttcagcgaagacttctggtacagccccaccacagtctcgttcagggggtccttgtttttgtccagccagccggcgatgttgtagtccacggtgccggcatagtgcaccagcgagaagtgagcctcagccttgcctttggcaggcttgggcttctggaagttgttggattttccaagatgctggtcatacagcttgttcttgaaggaggtgtctgttgccttggggaacatgcactcctcttccaggatggagaagatgcccataggctggaaagaggataacagagtctacatataatagtgcatacccatgcttcatggtctggagaagccaaaaaaccttctttggtgctttcactctggtaccaggaatgctggcatgtacgctcggtgagagcaagactcttggtctgtttgggggatgaccagaaagtgctaggcatagagtatgtgcttaattaatatttgctgaacaaaagaatataggataaaattatgtgtgtataaacctagcatacttttttcaataggtgtacaaaaaagtaaagtttcatatatagccataaagtaatgtgagtaatattttgaacaataatgtcccaatttctcagtagccaccttaggaagatatactcattccaacatgagcagtgctcaaatattatgggaattcctttttaaaaagttaatgtcggccgggcgtggtggttcacgtctgtaatcccagtactttgggaggctgaggtgggtggatcacaaggtcaggagtttgagaccagcctggccaacatggtgaaaccccgtctctacaaaaaaaagaaaaaaaaaattatctgggcgtggtggcgggcacctgtagtcccaactattcaggaggtggaggcaggaggatcgcttgaacctgggaggtggaggttgcagtgatccgagactgcaccactgcactccagcctgggtgacagagcaagactccgtctcaaaaaaaaaaaaaaaaaaaaaagttaatatctattcctgttttcatattaacatccctccaagagccacactgctccatggttccgcctccttgggtctttgggtaagtcaaataggtaagaaatgccacagtccttactggggttccatcacattcttggagataactgagcccttggattttaatgacccgtaaacctctttaagtgtcagaacagatttaggacattcattctctttgcaaataggcattcagttatctatctgaaggcttgcagcctgggggctaggggccccaatctgtgagcagaaaagaatcagagcaagaaggggagggcccccaataaggaggagctgtcccaggcagcagtatctctctaccttctcgatgagctcgatgcaggcagccaggtccattccgaagtcaatgaactcccactcgatgccttccttcttgtactcttcctgctccagcacgaacatgtggtggttgaaaaactgttgcagtttctcattggtgaagttgatgcacagctgctccaggctgttgaactgggtgattcaaataccaaagaatttgagtgagcttggaaaatacattggagattcagcaaagcagacaagaaagtagaaggtcacaactcacatcaaagatctcaaagccagcaatgtccaagaccccgatgaagtactgcctgggctgcttggtgtccagctgctggttgatgcgggtgaccatccacaggaacatcttctcgtagacggctttggccagagcacccaccgaattggtcaccttgaaaaaggatcacccactcaacccttgagttagtgtttctatggctgcattaagttgaaacatatgaaattgactcgaaaatcaaaagctgttggctaggcgtggtggctcacacctgtaatcccagcactttgggaggc[134 bp omitted]gaggcaggagaatcacttgaacttgggaggtg[138 bp omitted]cattcaatgcaatattaaatattttatgaggtgtttgcccagctcatgttgttcacctttctttgagaactatcctattcacaaagatatttttctaacaacatggttatagcacatgactccagcccctggccacacttaattagaccagaggtgaacacttgatccagattggattaattgagtatctctcctaagaatttggaatagggatcaaaagacactggtctcagtctcagggtgaggctggaaacacagagatataaacttgggagctatggggtggccacgggcaagagaggtccaggaaacttatctgcctagcaaggacacaacagaggagagactcaacagcccatgaatcccagaggagctggagggaggctgcctggctccagagggctcttcactttctaattccaggtcctcatggcgtccaatgggcacttaatgatttgcattccttcagttgcctctgaagcctaaaaatgaacttcctcttaatgtgaaagctgatttcatgtgcatttctgatacctgcaactgaaggagctttaagataatggctcaaatagcaaaagatctcaatcaactggattcagagcatctccattacctgctggacattttgccctttagtgacatattcattgccaaccttcacccttggacagcacaggcccttcagcatttctgcagaattcagtcccatcaggtatccggctttgtcagccactgaaggaagagaaaaaaatggcatcatgcaaaaacagtagctgctaaagtgtccagtcagcccctggcttctcccagaagtgttttctgtaattttcttaaatgttttcatgttgtcatatctgtaccaggtctggacttgttcactgaagctttaatcccatatccaggggcccatggttctcaggaacttccaatttgcctcctagatgcagttttaacaataagatactccgtggccaattttgacctactgatatttcgatttcataaaagaatgttgattacaggccaggcacggtggttcatgcctgtaatcccagcgttttgggaggctaaggcgggtggatcacctgaggtcaggagttcgagatcagcctggccaatatggccctgtctctactaaaaatacaaaaattagccaagcattgtggcaagcgcctgtagtcccagctacttgggaggctgaggaaggagaatcacttgaacctaggaggcagaggttgcagtgagccaagatcgtgccattgaactccagcctgggtgacaagagcaagactccgactcaaaaaaaaaattaattaattacatagttatgttggagtctgacaatacgttaaaatgttatatgagtaaaggagccaccacttggacagttgacaatatacatgaggcaccttcctaatttaagcaaagtaccatgctcatagttgaaagagaagtacaaaacttgaccctcccttcaaatgtttggagatggtcaaaagcacttgacttttggctgtttcctacagttcatgggttatatattttcatatatttcagcagacgttcattgactttgagaaggacctgggggcctgcattgagctcatcaaaaaggcagagaaatgctgctccccagggactacttctttttttttttttttttttttttggagacagagtttctcaatgttgcccaggctggagtgcagtggcgcgatctcagctcactgcaagctccgcctcctgggttcacgccattctcctgcctcacctcccgagtagctgggattacaggcacccaccaccaggcccggctaatttttttttattttagtagagatggggtttcaccatgttggccaggatggtcttgatctcctgaccttgtgatctgcccacctcccaaagtgctgggattacaggtgtgagccaccttgcccagcccccagggataacttcttggttgggacccttgcttcattgctgggtggggagatgagttaataaaaatctagggcagtctatgttaagtacttaatcagaggccagatgcgtgctttactctctcctcgaattatctccttttcttgctttgcccattcaggtagatggtaccattattcttcttcttgtcatttaaacttgaaaggggtgatacatccttctctctcttgcccctgacattcctttgttcagacaggcaccaagtcctgcttatttcactctcaaaatgcctggcctctccactgcttccagcagttatagtggccaagagcctgggctctagagtcggactgctctaggtttaggtttaggtttaggttttggttttgcttctttgtgcctcagttttgtctgtaaaatgggagacagtgacaatactcatgttatacggttgtcgtgaagcatgcctggtgactagtgagcacccagcaaatattagcttgggttggtatcgtcattgatatcattggagcactggccttgattatagtcctccactttctgctcctaagcactgcacacacacagctgctagggctggaagagggcctgggaccctactgaggtatatcaatacgtgtatcaatgcagtccactgttgctgaggagcctgatactcttttttttttcttctcaagttttcccacttttggtgagcctggctgctgacagattaatttcaggttgtctgcatgtacttcccctgctacttggacagcggcttccgtggcctgccatatattctaaaccattcatcctgacactcaagatcttcccaaactgatgcaaaaattgttactttaaaattctcatttcttacaaatccactgcttatatcctgttctgtagccaaagtggaccactcactgtgcctccatccccatcacagttcatcctctgcccctttgcacatgacccttccttccttctcccttcccttcccttcccttccttctcccttccttctcccttcccttcccttcccttcctttcccttcccttcccttctccccctctctctctctttctctttctttctttctctttatttcatggagtttcacgattttcacccaggctgaagtgcagtggtacaatcttggctcactgcaacctccacctcccgggatcaagtgattctcctgcctcagtctcccgagtagctgggaatacaggcaggcaccattatgcccagctaatttgtatttttagtagagaaggggtttt[138 bp omitted]ccccaatttttcagaatcctattcatccctcaaagtccaagtcagtgccccttctatcaggaagccttccctgattgccccagtcagaagtgtttcctgtgtgaagacttggagtcccctccactgtgatgggcaggattctaggatggcacccaaggtgtgccccctggtgtacatgccttgtataacctcctttacttgagtgcagtggaacctgtacaactcccatgatgcggtgaccaatcagttgactttgagttaacaaaaagggagaattatcccaggcaggcctaggatagaaggttggtaagcatttatgggacactgataaggttatgtagattttcccaccctttaatttatggctgcacttcctttttattacttgagagtttaaagcgcactgcttcacatactgtggggctgtaatcaaaaggcagaattatcaagaacgatccatgttgccaggctttaattcaaggaacttgtaagaagcatcgtgagagctaagaagtctaatgagcaggacgtatggtggggagtcagtcactgctcagcccttcctgctgccctgtgctctagttccaggcctcttagggatggggcagagggtggcagtaggatcagctaggtgagagttatggggaggaagaaccgttcaccattcttggttcagggtcaagttcaacagacgctggggtggaggcgatgggaggaacaaaacttggctcccactttaccaaaggcctcattttaggcctgagtaattaagactgcattctggtggagagaagagaagttcacctaacaatattgtctcaaaaaagtccaccttaaaaaaaacaggcacatttagatggtgaaagatagtggagtgcgtggtgattattcatttacaagaatgatgctttttgtttttcaagaattcactactctgggagtccttgactgagtgagcagacttcctagtgcatgctacaatgagcttcaggaaacccagatttgatttatgcagttttggaagaacagctcttgaaatgaatgcagtttatctcacacggcctcgcccgcacatgaacatagatggacccaatcgcatccctttcccagatgcagttaccttcggtgccgtctggctccgcctgctcctcacgctgcttctgcttgaacttcatgttcccataatgcatcacggctcccgtcagtttgtagatcccgactttctcctctgagctgaagcccaggatgtcaatggcattctggaaagaaaaaaaggacaactgtcatagcaggaatcagggatccatatgcagccttttcttggcaaagaccttacctcttttttgtatagcatatgagacagcatttgcccaaataagtggatgacaggtggggatgtggtaaattagaaaccatttgtttcacgtgtttgtgtgggtgggtgaagactatgggaaaaaga[133 bp omitted]ccaacatggcgacgctccatctctactaaaaatacaaaaaattagccaggcatggtggctggcacctgtagtcccagctactcaggatgctgaggcaggagaatcacttgaacctgggaggcggaggttggagtgagccaagattgtaccattgcactccagcctgggagacagagtgagactccatctcaaaaaaaaaaaaaaagagaactgattatgatcttttctcactgtacatagatttgggggagcagttttctggatgaggcgattgggaaccattgtatgatactgagagctgggaatgtcatggagaatgactgggaaataatgtttaatggcttaagagtttggcattgtaatccaggagttccagcattgttcagactcaagacaatatgcattatggaatattagatctggaagggaagatcatcaaagatggcatcatcatttcccaaatgagaaaggggcaagcttttgcagagctctttctatgtgctagacattgggtaggcatcatctgtatgttattaaatccccatgaagcccctttagctgtgcaggtttttccagatttctggatgaagaattgagggtctagttggtaagtagcctgtcatacagggagggtgtgataagactgggactggagttaggtcttggtcccttcaaaacctagggtcattgctggtttggttttataatcatgttgcctgtcttccaccacaaaggtttcaacaaaaagaaatccttctctggggtacacatattgattatgcagtagggtttgcagcctgagcctgtagagtgtccattggtaggattgaaacatgtttggacgtgtttggtgagcacgtaggatagacccaataggccaacaccagcaggatgatattggagagtcaagcattcttggagtggcaccccctttagtggagaatgagcctatgccaggagctgggatatatggggaggagagattccgaggccatgatggccatcccttgaatccatatcccatttcagggttgcatatctctgtcctagggaagggtcgttgtaggttaaaagagaaagaactctttcaaaaacactaaaaggagcaggtgaaagcgtcactgcctggggacccttttggagaatgtcatctccaaaggggtgcaggtggaacctgggtatatgatgggatgtcactcccattatgaagttaccaatcagttgactttgagttcataaaaagggagactataccaggcaggctataaaagctccgtgaggccaggcgcggtagctcacatctgtaatcccagcactttggaaggccgaggtgggtggatcacaaggctaggagttcaagaccagcctggccaacatggggaaaccccttctctactaaaaatacaaaaattagccgagcgtggtgacaggtgcctgtcatcccagctacttgggaggctgaggcagagaattgcttgaacctgggaggcagaagttgcagtgagccgagatcgcaccactgcactccagcctggggacagagcgagactccatctcaaaaaaaacaaaaaacaaaaaaccaaaaaaaggctccgtgagaggaaggagcaacagccgcatctggcagaaggcatcttggtgaggacatgacttaggtaaggtgacttttagaattccttaggtgggcctttctcagtggatgggggccttgtagcagtcattagcctggccctttctgtgcttacaagttagtgaagactggggaaacctcattaaaaatatataacaacttaaattaaatttggtctaaaactgcctccatacatagcaaactataacctaaattagtatgtaaacaaactgcaacctaagagtatattcttgtaacaaatagctgagtctcagccagtcacagcagctgagcttcagccaatcacagcagctgagcttcagccaatcacagcagctgagtctcagccaatcacagcagctgagcttcagccaatcacaggctgccaaactgatgggccattgtgcatataacacaaatgcttcatcacaccacctgcagataaggcaaaggcagacctgtacctaatcaagctgtttctgtatgtcacttcctttttctgcctataaatactgcctgccatgttgctgggtggagctctctgagcctctccaggtgctgagtgtggtccaactcatgaatcattctttgcacaaataaactctgctaaatttaatttgtctcaaatttttcttttaacactattagacctaagataacaagtttatttgatcatgaaaatttttctatttgtgttaaaacaattattatcagctggaaatgtcaccaaatgaaggctaagaagctggtcatggggcagtgtctctaggatgatggacaagaccccttttcgcaagctcttgaagcttttgtatgggtggagccaacaagggtggagatgaattgctcacagacggtatactttaattaaaaatgtaagctctgtagttaggcagacctgtgtttaaatactctgtcattgggcctggtgcagtggctcatgcttgtaatcccagcactttgggaggctgagctgggtggatcaccagagatcaggagtttgagaccagcctggccaacatggcgaaaccccaattctactaaaaatacacacacacaaaattagccaggcatggtggtgcatgccttgtagttccagctacttgggaggctgaggcaagaga[137 bp omitted]aggaaggaaagaaggaaggaaggaaggaaggaaggaaggaaggaagggaaagactctgtcattgacgaattgtgtcttccagaaaattatatatattttaagaatcagcttccacatttgtaaaatggagacaataatgacataattttgagactataatgagacaatgcaggtaaagccacttatctcagtgcctggcacatgtaagtgctcaatatatttggttattattgttattaagattattaatcctacaggtacttccccaaaataaacaccacaggcctgacaggtgtactgaggagctgagtgtctaaggtgagcctaaagtgaaaggcagaaagaaaaatggagaggctattacagagtgggcttggttttctgctttatacatttttatattttctaaattttcttgaagaaccatgtagatggttttgcaacatgaaaactttcaacgaatgttaggttaaagatcttataaatgcaaaaatgcattccagttaaaatgttagagaacagaactgaaggcctgctttggtgaaccttctggatttccattttggaatgctgtgaggtggagctgagtagggaggggccaatctgtgctaattctctgagctcttgatctctgagatcttgagtctaatcacttagtatccctggatttcagctttcccattagctcactaacgtgtctctcagttcataaactcaataattctgtgcataaacagacaaataaatggcatgcttacatctgtcgccagcagttcttcactgtcatcgatactggctaccgtgacctctccttggctcacgaaggggaagtcgaaggggttggtggagatcagaagcaggtctgtgaaacacagatatccctttaatggcttatgcataacttactctgggttgttttttttttcccaacgtcaccgatttggaacataagaaaggtattccaagagcttaccaattagttctggcttcttgtttgacataatttggtagaaaatatgatagcttctctcactggataattgaaacgtcactctggatttttctaacagatctaaggtaacaaaaataacgtgatttcaggctcccaagagatgcttttgtggccaaaacaccaacggatttatagagtgtttggactcacaagtttcgatgtctgccgatgccagctttcctgtggctccaaaatgaatccgaatgaacttcccctgtccaataacaggtggacaaatgttacggttatttgatttatatggttttgtggctggccttagataggtgctgccacagataaattataaatgcaaaaatgctagagaacagaactgaaggcctgctttggtgaaccttctggatttgcattttggaatgctgtgaggaggagctgagtagggaggggccaatctgtgctgattctctgagcccttgatgtctgagatcttgagtctaatcacttagtatccctggatttcagttttcccattagctcactaacatgtctctcagttcataaactcaataattctgtccgtaaacaaacaaataaatggcatgcttacatctgtcgccaacaattcttcactgtcattgatattggccaccatgacctctccttggctcagaaggaagggatgccagaacatgggcacctctccaccgggtgcccagtgctcccaagctgggtcagcaaggactcaggtagctctacccaagcacctgtccctgttcccacaactcaggggatgcccacaggctccttctccagctctcttcttgggactactccattcttgactgcctgcctggttttcatcctgttctcttatacctggattcttaaatcttcataacaccttttaattgtaactggttggattgttctgtctgactttttttttttttttttttttttttttttttttttttttgcttgtatcttaatagatgctacttctgagatttcttgcctgagtttcacatatggctgactacagacaaatctggctcagaggcccgggctcaggctcaggcctggctccctggctgccaaaagaacaactcagggtctaggtggcccactttctggggagtgggaggtaaaatttcatatgcgtgtttgtgtgtatgcacctgcttcatacattatctgcttaattggtcctcaacgacactgtgcgcaaatttgaggacaaaaaatgttttcttgctttttcacccacagtgtctgaaatgtggatggtacttagtactagcctcaatattttctgaatgaaccccaggaaaagttagtgaaggatcagtaaaggcacatgtgcactgtaagtgctgtgtcttcagtatatttagcggcttaacagaagacaatggaagtcatccctagcctgcaaatatttggagggtggaaagaggacaaaataattagaatgattgtgacttctgggtcagggctaagagtagaggcccatgaactaagtaaatgggaatgagaagagggagtgcctgaaggtattgtctttcactttaagctggtgtcaggccagtgcaataactaacttggtccaggcatgggtaacatacctctgccatgtaacatgtgcccagatcttccacaaggaagaggagtttatttgggcactggggaggatacaggtgcaaactggcagtgcacagggtacaaagaacatatccaaggaaacaaaagtcaaggctcagagccatggtccttgatggattacctacttcctcattgataaccattttatctttcaggcgacgaaatacaagtttgagactatccaactattaagatgtgtgaagttttaatgtacttttgcaaccataggcacaaatgatggctttgcctctgagtacttgctccactggccagtgaaatgaaatagagggctggatgtgtgtttatttccgatgggaagtaaatgtctttttgattaagccaaacctaagtaaaaagttgaaggatggcatatatccttcaatatcttcagtatgaatctattccaatatttttttcttttttttgagacagagttgccctctgttgcccaggctggagtgcagtgttgcaacttcggctccctgcaacctccacctcccgggttcaagcgattctcctgcctcagcctcccaagtagctgggattacaggcatgtgccaccatgcccagctaattttttgtatttttagtagagatggggtttcgtcatg[139 bp omitted]ctgctcccagtccctactgagttggaagaggtcaaatctgctaacttaattcacactaaggtttccgtggctagaccaatagatatggcttaatggacgttaacattttaaaatgtttccacacagagagacccattttagcataaagttgatctctaattgtgggatttgaatcatgtgagtgacttcaggatgctgtgaggtgacattgcctagttagggtaggacggcaaatcctccctctgccaggaccaagccaacaccttcctcaaagtgtatcacaatattccaggtgggtagattgatctcaatcacttgggggtagaaaaaggcccccatatattccagtttatggggcagtttttcatatccagcatttcaggagagggtatgcttttgggaggatacttgaaaattgggccggatcttacaaatcttgaggagttgtcattcctcacagtcttggcatttccaaaggcctccagcagtgggttggcctggatgatctgatcctctagggttccctaataataaacaagaagaggaaaaagaggactttggatggttttctaaagtagccccttgatgactaaaacggtgggtactctgggcaggttcaggtagagatgtcgaccagctccacctggtggtcagtgcagcacccacgcccccacccccaccagacctgaggcgtcttcaaggtaccatcttagacaggttcttattagcatagcattgaagtgacttctggtcatgccaggttctaggcaggaatattactccctccatcagaacatccagactgcctttctgataacatttcattataaatcatggatttttataacatgcacctctgttattgcatgtaatatgacccacctaatatagatatttgtcttcagaaggagaaatagaatgtgagcaaagcaagcgacccaggggatgatacaataacaacagtggttctcaaaaaggttttttatgtagcaaaaacttatgagaatgattattcagaaatccactacagaaagcagagttttcaccttcacctccatgactgctttatccttctgggtccagagcaatttagaaactactgtcaaacctagtggttctcaaagtgtggtccctggaccagcagcatgaacactacctgggaatatatgagaaatgccaggtatggtagttcacactcgtaattagcactttggaaggctgaggcaggaggattacttgaggccaacggtctgataccagcctaggaaagatagtgagactccatctctacaaaaaattaaaaaaaaactagccaggcatggtggttcctgtagtcttagctacttggaaggctgaaggatgatcgcttgagcccaggagtttgaagtcacagtgagctatgatggtgtgccactgtactccagcctgggtgacagagtgagaccctgtctctccaaaataaaaaggaaaaaaagatgcaaactatgaggtcccaccctagatctacacaatcaggaattctgggcctgggttctgccgccctttgttaagaatctctcctgttgattctgatgtgtactccagtttgaaaaccactggtgtaaacattccttctccagaggaggatgtggagttggtcaaggtccctcaactgtaggtgatggagctggtgctagaactcaagtccattctggtggaaccacttcctgctttgctccatgtgatactgtgatgtaataggaatggtatattttggtctttttccagtttcctggtacgcagctcctaaaacccttggaatatctgaagtgataaatgtctttttgtgtgctaatgagatgattggtggcttcggggtcctggacagctcaggatgggggctggctgccagggaaccaaccgcgtgattagagagttggaactttcagccctattcctgacccctgggaaggaaagaagggctggaggttgagtcaatcatcaatggccagtgatttaattaatcatgctcatgtaatgcaacctctataaaaaccctacacagaaggcttcagagaggttccaggttgatgaacacctagaggtactgggaggatgtcacctgcagagaccctgcccctcccccataccttgccctagacatcttttccacttggcttttcctctgcatcctttgtaacagcctttataacaaactggcaaatgtaagcaaagtgtttctctgagttctgtgaagcactctaggtaattaccaaacctgagacgggggtcgtgagctcctcccaattaatagctgcttgcttagaagttcaggaggcccggactggtccctggtatccaaagtggggtcagttttgcaggactgagcccttaacttgtgtgatttgatgctttctctaggtagttagtatcagaattgaattgaattgtaggacacccagttggtgtctgcagagaattagagaattgtttggcatggaaaaaccccatacatttgatggcagacacgttctgtgtgaggatacagagaggaaagaaagaatttttcctatttgccgtttctactgagcgcataccctgcatacacttggtgctcatccacgctttaaagtatacttattccagtaagcctccggatgcaggtggggctgctcacctgcattttgcctggctgtgtctccttcttcttgtccccggtaactgcaattgttgcaaaatactggatgacacgcttggtgttcacagtcttcccagccccggattctccgctgccaatttaaaagtaaacgggataaaggagagtggaagggagggcactggtttccaagtcatgatggtacaaagaggtgttactcacgtgatgaggatagactggttgtctcgatctagaaatgcagagggaagcaaaacaaaacaaataaacaacaaacagaatgttaaaataaagtaacattgggggtggttggagaacataggctctagttaatgtctttgccattaaccactggtatgatttgggcatgtctaatcttctttgggacaatttaggcagatttctcaaatgtgggatgtgcaacatgaccagcctgggaggtgaatgattctctactcactgtagtgaatcccacagtgtagaagttactcatgtttatagatctttaactccctgctagtcctttcccatcgcccttttccataaagaaagcaagtgtcaggttcagagcttgtggggccacagcttttcatcagcatttatagatgctggttggtttcattgcatttttcttttacctttaccttctacttgtgaaaagtgatactggtttttcatttacaatagagcatggattgaactgtgtcctcctaaaattcacatattgaatttctaacccctagtacctcagaatatgaccttatttggaaataagatgtaaacaagatgcaggggtaattactcaagatgaggtcatgctggagtagggcaagcccctgatctaatatgactggtatccttataaacagaagaaatttggagacacacaagcacatggggagaatgccatatgaagattaaggcagggatcagggtgatgcttctacaaataaaaaacaacaaagatttctgctagcaaaccatagaagctaggagagagagacatgggccagattctctctcagcgtcctcagactaaccaatcctgatgacaccttgacttcggacttcaatcctctagaactgtgggaaagtacatttctattgtgtaagccccccagtctgtgatactggagcagccatagcaaactaatagaaattgtggtattagtcttccctttaaaattaatgtaacatgaactaatttcaagaaaaatattaagtttgcagacatggcaaggattgtgattgtgagacagaaatgacagaagtttggacaccattgcattagatgatttttaagcatctacaggtctcagattcagatgctagactcttttttttttttttttgagacggagttttgctctttttgcccaggctgaagtgcagtggcgagatctcagctcaccgcaacctcctcctcccaggtgcaagcaattgtcctgcctcagcctcctgagtagctgggattacaggcacccactaccatgactggctaatttttttgtatttttactagagagagggtttc[132 bp omitted]tcaagtcaggtgaaggttgaacagacagacttgatattaggcatcatggcatgacagtgttaccatgtccttactccccaggtcattctggaaattaaaggaggtgaaggggagcctgagtttggggaagaacgcaggaacactgctttacccatttctccaacgtagcattccctgagtggctactgatatggtttctcttcaaagtacacctggattgggggttccctggggacaaaggtagggcatctccttgtgttccacattctcccaaataagcaagagctcagtgtagcttcagccataatcacaggccttgtcatgcactgtgactggcaatggaagatgttgtaccctttgcttttcatccccaaatcatctgactctccgaagatcctttgattattgcaccattcagatggccaacgcccatcaaaagcttgaaaaattaactaaggatggcttcaaaaaatatgaatcaaagaaattactcaccagtcagcatgaactgataggcattgtcagagatggagaagatgtggggcggggcctcctggcgctttttgcctctgtaggcagccaccacctcgggcttgtacaccggcagccacttgtaggggttgacggtgacacagaagaggcctgagtaggtctgggaagatcagaacatttatcatttggatctcgtttttactcagagagagacatgaaataaaaaggtgtttacagacactcacgtagatcatccaggctgcatagcgctctttgaggttgtacagaacagcaggttcatgcaggtgagtcatcatggccatgtcctcgatcttgtcaaatttgggagggttcatggggaagacctggtcattgttcagagtgagcatctgggtattgagaggaaaagcaggtaataaattggtgagccaagtgcccacattgcactttactggtgtggtggaagtagtgagatattgtggaggaattaccgcattgtgatggataatttcatggatcatttccatgccccaacatgatccataaataacagttcttgaagaatctgattctggtcaaactatgtaaccaattctggtctgatgcccctcagtcatcctgctgtcgtgtgtaccaggagtgggttacaggtgtgcagagctttggagccctttgcctctgtttaccctatttgttgtgagtgctgtgatgagacaaaggttggaaggttacaaagaactgctccaaagtgttctgtgtttttccacctcaaaatctctgctcatgaggtttccttcagctggaatgtcttcatgaaaattttgtttagaaaccttcaaagctcagctctagcaccaactcttccacgacccatctcctctctcccctattgcttcaaggctcccataattatttgtacctctgctctaatagttcagacatttgggggtgcatcatggttctttgctgaatattttcagaatattatttaattttttttccctctgtttttttcccacctctctcccccattcaagctggctctgcactccatggctcaggagagacagaaaatagggcaagaacagctactagggaggctgaggcaggagaatggcgtgaatccgggaggcggagcttgcagtgagccgagatcacgccactgcactccagcctgggcgacacagtgagactccgtctcaaaaaaaaaaaaaaaaaaaaatagggcaagaaaagaaaaagagcttgtaatacttcctggattttgttttccaaaaacctaagtccttaggaaaactttgagggtttcacagaaaagataaaaggaaggagttttgctggtatagaccaaattttttgaggaaggaaaggccttccactccaccacccaagactagaaaaagagaaacagacacccaaggtagccaaaggggaggtagaaaagtctatgtatcctgaatctttaaggactgggacttgtttctgaataaatcctccagggaggctgtgagtcccccgtgtagtgctgtgtaaggttctgaaaatgtgacatattcctgaggcggtggtgagggcaccccaagagtgactgaacacatttttccccagcccactgaaaaaggactggaattagaggttaagtttaataacaaaaaataaaagcaaggtctctctcatatgcctgagtttgtgaaatgagattcatacctgccatatacatctttgggaaactttgggaaagcaggtgcagaggtatgcttatatttgcaaagcgatcaatgctatgacctagacctggtagatgtccggtaagtactgaatggtacatgataattctccacattaagtgagtcaatggctcctgagcttcctctgtagcagccactctgcagcccagagaggtataattggtcggcccatccagtatcagcctcttccttaaatagaccaaccttttctgccctcacctgctgctttcctctaaagcaaacaccacaaaacccctcaaagcccaagtccttggagaaggaaagaggcaagagtgaaggtgcatgtaatagcagctttcatctgctacttcaccgcagaacagataaactaagttttgttctgtcttcagattccgaaggaccagcatgcaatttctaatattctactccaaagaaaaatgagcatgcccatattatcaaagacatctgtaatcaacactcacccggtcatcgagggtcttgactatgactttgtcattttccctagtctggatcatgcctttcacatacatttccttattatccgctacaaagcaggctttcttggaatcgaatggacgattttgagcctcgattctctccttctctggtttccggaggtagggagctgcttctccaaaaatggccatttctgcgtcagagctcatgactgcagagggctgggaagaccagagggactgctgagtcttgtgcttgggtgactgctgaagctgcagggcccctacccttattctattaaaacggggccagattcaaaggctcctagattgaacataggtcctgagggatctatggccaggtctaggagcttaaagtgtgcaagtgggaataagctaaaggggatattttattctaacaaaaaagtatgaaggtttttttttttatcctctgagtgtcgattttgggaatattttagttcagtcccatgtgtgcatgtctgaatcaattagagccatggtgaactcaataaaagaggcttcaggaagcactttctttctttctttcttttgagacagagttttgctcctgtcacccaggctggagtgcaatggctcgatctcggctctgcaacctccgcctcccaggttcaagcgattctcctccctcccctcctgagtagctgggatcacaggtgcccaccaccacacccagctattttttttatatttttagtagagagagggtttaaccatgt[138 bp omitted]atctcagtgtcagtttaaaatcttaagaatatttgaaaatcgtcactggaatgctgataattcttaatagacattttggttagccccgtgaaaagtgaatgacttgaacatgaagatttgtcacatttgtttaaataacaagatgatgggaggcaaaatggcccagggcaatggtcccaaactttaacatgccagaatccccttgaggggttgttaaagcacagattacgggccctatccccatggtttctgattcagtaggcctgaagtggggcccaaaaatgggcatttctagcaagttcccaggtgatgcagatgctgctgatccagggaccacactgaggatggctggcatagtgccttcctgttcccagggtggtccttgaaatgcagcagcttcatgcaggacttcattaagaaatgcagaatctcagacccacccaagataatgggatcagcacctgctttttaacaagatccccaggtaatttctatgcataggagatggggaagtactgggcctctaaactctaaacgcggtctctaaactttgtgcgtggcggtgtcagggtgtgacaaatattgtttagttagattaatacccaccttagaacttgctgcatggtgtgtgtgtgtgtgtgtgtgtgtgtgtgtgtgtgtgtgtgtgtgtatggggctgtgtgtgtgtagggggtattggtctctctcatcccttgtatcactttctcctaaactatctccctttgctgcctttcttgctcttctctttatgtattttttccttcttttatgtaatgtattgtccctgcttagaatgcagaaaattcatcttaaagtcctagcactgatcaaaccacttaagctctctggtccacagcctcttcccacttataagggagaagccagcctcactcctgtctaaggttcccgtaagtcctgtgtggactgttcctcttctcagaatttgcttctctcattccccctcggcacctcttccctctactccactacctattttcctcaagtctctttcctctttccttcccttctctcctcttttccttcccacttaattctataactgacataaaatggagtcaagtcatacacacacacacgcacacccacacatatctctccatatctctcttaagaaataaatctgtttttttttttttttttgagatggagtcttgctctgtctcccaggctggagtgtaatggcacaatctcggttcactgcaacctccacctcccgggttcgagcaattctcctgcctcagtctcttgagtagttgggattacaggcgcccaccaccacacccggctaatttttgtattcttagtagagatggggttttgccatgttagtcaggctggtcttgaactcctgacctcaggtgatccgcccaccttggcctcccaaagtgctgggattacaggtgtaagcctccatgccccgcctgaaatacgtcatattttttgaataaggtcttttatgtcctctttttatagtgggaaagttgaacatgttatagttctctcccccatcttagcctttatgaaattgctctctttattggtaactggccattgttgaaatatcctttcctgtgattctgtggggttctgtcttacagaaagaaaagcatccacttcccatggggccttattcagataagttgcattttagttatactttgttcagtggctctgctgaaccatctgtgggttcatggttaggttttcatagtaagggactggaattcaaatgcagcacccacaaataagactcttggcctgcagccatcatgctggtttagagtctctcagttaccacctggaggatgagaaagaattcatccacatggctttcttctctcatttctttgaagatagtccctaatgtaatggcttaggtggatttcgctacagcagcggttctcaaactttgtggtttcaggacgccttcgcactcttaaaactaaatgactgaaagccccataagatttggtttatgtaagtcatatctattgatatttaccatattgaaaattaaaattgagaaattaaaaaatatttattcattaactaaaaattactgtcaaattcattacattaacataaacattttattttattattttattgagatggagtctcaatgtgtcatccaggctagagtatagtggcgcaatctcagctcactgcaacctccacctcccgggttcaagtgattctcctgcctcagcctcctgagtagctgggattataggtgcccaccaccatgcccagctaatttttgtatttttagtacagacgggttttcaccatgttggccaggctggtcttgaactcctgacctcaagtgatcctcccgcctcagcttcccaaagtgctgggattaaaggcatgagccaccgtgcctggccaacataaatattttaataaaaattaccatattttccaaaacaaaaagactagtgagaagggtagtgttttcattttttgcaaatctctttaatgtctccttaatggaagactgttggattctcatatctgcttctgtattcatgccattgctgtatgtttggtgaaagtaaatataaaatatttagctatgtaattcagaaaaggaaagagtattttagtcaccttttcaaataattgtgaattttcttctcagatactctaccaaaacttgacaagtggtagtttcttaaaggctagttgcaatgcggaatctgaagccatatcaataaacattttgtactctgttacattataatccactagtctgtcttgcattttgagtggatcttcttttcccatatgtgaatttcatacagtggttgtttggaaaatactggttcactgaattatatagtacttccaaatgtggacacattttcttacacaatattaaaaaaattacaatcatcaatatcaccagtgtgatatcatttgaaaattctttcagtactaggaagttgtcaagctaatggtggcaaatacatgttttcctgtatgcattctcatttatacttgaaggctcaaagttgtgatttataacaaatgctgtcagttttttcctcgagacgacaaccacattgttccttttggagaacatgtttgccaaatatccaagtctgaataaccatagcttgtctgctagttggtcttttaaataaaaatggtgctttatgaataaaatggccagttcagcttgcaactcacacaaatgcacatgtgcttttccaggagacaaccatcaaactttggtggacttcccatttcatcacataaaattgttaatgaaactttttagtgcaagtgtatggtagtgaagaatacagtaattactaatacagtttggtgcggtgccttgatttgtaataaggtaccagccatttattcatccttgcttttgcatcactcatgcagtgaaaatggcaaataacagctgggtattattgtgaaagagttttagcctcaagtgcctcctaaaaagttcttgggactctacaagaacccacagaccacactttgagaatggctgccctattgcataagggaatcctgactggttacaggtttacgaccttataatatgtagcttgacttagcgttaagcatgatacccaaaagtgttggaagatgatttacttcaaaaccctctgcaacataatctctatggctgggaccagggaatctgattttttgataaggtcctcagagagatgtttgggaactactgatttaaagcattactttgcttgtatgaaactactctgtttttctaaagccaaaaccatggcacagtctcattgcttgtacacaaaataattttaggcaaatatttcttaatttaatatttgtatgcttattttaaagcctattaccttattttatcaaaatttgccatcaattataacttccacaaataaaaaaatgcagctaatttaaactgcaatgcttctttcatagattgtaatatgcatcctcatttcagggataaatttgtaaaaaatataaaaaaatcagaattgatggaaatagggtaatatttgtttaacacttaggaagcgtgctacatccatgtattctatgatataaatcagtgtttgtcaaacttaaatgggcatatgaatcctactgtgaatattcactaggtctggagttgggtttgagcttttaaatatcttacaaatttctcagctaatgctgatacagcaagaatataaggtaactttaaaaacaaataagaaaagaaaatgaatcaatgtaaatacaaatattaagtaaattgacagtattggtgttaacatggctattgcaaaacttgtgatggcaataggagaataaagtctgaagtcagggaaaggctgccatagctgatagttgagccatatttttagtcctcctggaaaaacaaggcttttccctgtgggcctcactgacagttttcaagtagagattttttctcccttcatttactctaaccgtgactcagaacccagtatctcctagtagtattacctagatgatgtttgagttatccctccatattcctgcaatggtgcatctaacctagttggatacttttaggcacaactcttttccctttgataggccaaagattcttcttgctttaaattaaaatctggctctccatttgttctccatttgaacagcagaaagagttcaaaccttcctacgtgacaactcttcacccttttgatggctgttctgtgttctgcttagctttatcttctccatgctaaatagcctcaacttccactggttcttctatgatgtgcttttgaatcccttaccatctcagtcactcttccctgaacccactcctgttaatcttttaaagtgtgatatccaaaccacatgtcaccctccactggagtgtgccctcacctctcttgacctaggtgtcatgcttgaggtggtgattgcctgttggcagccacgtctcacactgctgacgcaccactccgtgtcgagcaaagcccctcaatcctctccgtgcatgcagttgctaagtcagatcttctccctatatttgtgcaactgtgagttgggacccaggggaagaccattcatttttgactgataaacttcaccttgttagatctgacccaagtctctaggcatgactcatgctgcccactgagcaccaccctctagagtttccttaattagcctcttctctgttccaagagcaggacctgcttccaacgttgcatagctgtgccccttcaaccactctgttcctgtctttaagggccttctaattgagatgactacccccgcctgcctaatctccatcacccacttgtgagggctcctctctctctgtttaccctctgtgtaccatgacactactctcaactttcatccctctcctgggaatttcaccgctactgtgtcttgtcagcaatgatgtgctcatgattcaatgacagcttggcttttttggtcccaattcatctagaactacctctaataaacacacgttttaaggggatagggtttttattaccgcaccgggcataggattgaacggatccctccccattccttcagtattacacgtgagggaaggtgcagctgtgtggattcatgggtgcagactctgctcaaggagcagcaaagttagcctttgtgtgaagactgcatttggaccctatgaacatcatgttctgtgccaactaagtactgtgtattgacttggagcttgtatgtcaaaattctgcattatatttcgtacatttcagtgtaatgagcaaataggagaagccattcttcctttggtaaaacctgtatatattttaaaatctacctttaagaatagttaagttattggtttcaaactcatcaatttcgtcttcttatgagtgtggcaagaatgagaacgtgtaaaatgatgtttgctaatttcaatgattgcattcatgatcaagctgaaaataacccttaccttcttggttcccaagtgacagtcagtgtccttcaggaataaagcgtcttcctggggataatttgagaaaaaaaaacaaaccaaaaaaacccaaatgagctacaaagagtttaaataaatatagaaaccatgtttgttccagtttatctaccttaaatagatacacagtagatggtgtggaatgaaataaatttgctgttttgaatttttacttttgattaaaatcattattctttaaatagttggttaattacaacatttaattaatactctcttgagaaacttctgtgtgtacaatgtactgtgtcagctccttaagggggtatgaagaggaaagtacagtatctgccctataggaatgcaaaagttagtaagggataagagaatgctcaagtaagtctttgaacaggattaagacaaatttttaaggagtctaaacaaagtactatgggaacttagagaaaccgcttctgactggggggctgtgaggggtcagggaagaaagaaagtagggaggggaatgctccagattgcagcttggatgcttaggggcagtcacctttttttggcaataggagaaaagttataaattgtggacaaagacttctttattctcttcaatgctctaaattcctcctgcagatgatgaaggtagggcagctgaaaagtcacctgggactaaggaatctcagctctaggagtttataaactacgtggctatctcaaggaggcatgagtgtctgaaaaattttcaatatcaaatgtaatctaagcaaacttcccaattaccattcagtgcttttatggagccaggggaatatttcatgaagccctatttaggcaggaacagacacttaggatttggtttactatccttgttgcctccttccttctccgtctttaatgcatcttaaataatctccagttatatcctaaaattctcacaatttcttaaaaaattaaagtattacatactatattctgaatcctcaatttaaaaaaatatggaggcagagctacagaaattctaatatcagttctgttaagtagctggtatgatttctttgggtttctgtttccttccgtaaaatgaatcagatgcaccagaaaatctccaagattcctttcagccctatgagtctataacagacagttctccgtagagatggtggcctgaattcaaagtatcacaaatctctgagggatgctattgcactgtcagacacagtccagtcccaagtccataaaatatgccatgtgagaacagtctgcaaaccagtcaattcatatcagactatgacactttgtaagatgggtaagatgcttgggattatttcctcccacaaccatttttcagaaatcctgacatgggaaacaaattaaataaacataaaaatttcaaataatagcttaagcaatcacagaagagataccacaagttaccaagttaatttgctaactgaacagtataacattgacctaaataatcagaggaggaatcatgcattatactcagttttgttctgcaggtgaatattttttgtcttataattgcttatattcttgtcttttcaccccttgtaaaagtttcttgaaaggcagttgtcttgtctttccatcttgtctccaaccttgccctcaacacaagaccttgcacttagtaggccctccgtaaaggctactttattgtcttccccccttgactggtaacctgatcaggtgcaactatagctacgtggagcaaaaaagtgagcacttgtgagcacttacctagagatgctgcggtcacagcaatttcaggagtgtgaccccccagctctctttatactcccaaatctgccagcccagcactctaacttggctatatttgggggagcaccatttacttgttagatgtaaatgcgtcgtagccctgatctctcactcttgttaagttacttggataaatgaccagtggaggctgcataatgccaagtcagctgcatagggattttgacgttggacacagatctttgagacttagagagtcctaggggctgagtggaactggagcagagtgtgctaagaaggtcactgaagggcagaaccacaggatgctttgtcaagcaatgggtgatcagtagtgtggacagtaactacacctcatttacccagcattggtatgggatggtgtgcttctcatctcagaaatctctggaaatttaaggttgaccttttaacacatccagtcttatttatgtatttgtttgtttaaaaatctactggaagaaaagctttccaaaatgtattttacattatcctgctctgtgtaacctactatcttgaatagaatttaagtttttcttgatcactctgggggtctgggagatgatataataaagtcatcaaggatctggttcttagtggatcatgcctgcactaattgttcctgctgtgaattttggtgtatacttttatttattattattattattatcgaaacagagtcttgctctctcctctaggctggagtgcagtggcgtgatcttggttcgctgcaaactccatttcccaggttcaagcaattctcttgtctcagcctcccaagtagttgggattataggcatgtgctataatcccatgtgttatatataggcatgtgctataatcgcccagctaatttttatatttttagtagagacagggtttcaccatgttggccagggtggtttcgaactcctgacctcaagtgatcctcccgcctcggcctcccaaaatgctgggattacaagtgtgagccaccacacttggccttactttttagattttctgtctttgccttcatggccagcctctcaggtataatttctttctgtggtaagtttgtctttactagcctgattttgtattattgattgggaaagagattacaaaattaagatcaggctaaagtaagagtaaataagttctgagtgcagctctagtgggttctaatgaaaatacgtggactttgtgacaattatagttacttaggagtttttttattttttgctaaaatataagtgatgtttgactatgtaggaacaactgtatatgtagaagttagagccatttactgcaatacagtgtgatctgtttaaattgtatataatcagtgtttgttgaatcaaagtttccttaatcagtctccagtgggtagaatttcatgtaggtagggcatttccaaaagatagtttgcattaatcaaagtgaattttagaccagaggaggagcaggtagagataggacttccacaaagtattttctcttccttccttccttccttccttccttccttccttccttccttccttccttccctccctccctccctccttccttccttccttctttcgttcctttctttctttctctctctttctttctctttctttcttttttttttttgagacagagttttgctcttgttgcccaggctggattgcaatggcgcgacctccgcccaccacaacctccgccttgtgggttcaagcgattttcctgcctcagcctcccgagtagctgggattacaggcatgtgccaccaggcccagctaattttgtatttttaatagagacggggtttcaccatgttggtcaggctggtctcgaactcccgacctcaggtgatccgcctgccttggcctcccaaagtgctgggattacaggcatgagcctggcttccacaaagtattttctaaagtagatttgacagaatgcagattgggagggtcgcttcgaaataaatggtcctgtggttaaatgagcttaagaaatgtgttaaactctattccctcctgttagagattcatcataaatattagcatattaagggatgtgagaagcccttcagtaaagaaatatgaatactttttttttagacctggaacttccctaggtgatttgatgttggaacacaaacttatttatttcctgttccagaaaacaagagaggaaaggctgaaggacataatccatagcaaagttctggcccagaagaaagcaaccgagagtgatcagccctaagcacagttgcttttatttgaggtgcagccttttgcatgtagcagatgctcagtaaatgttcgtcctggtgaataaatgaatcaagatgactcataggggagtcatcctgactcatgtgttgaaaggcctgaagtgataagaaaagaatggaatcagactctgagtttcatttaatggtaataattaagacttaagaactaggctgggtgcagtggctcacacctgtaatcccagcactttgggaggccgagccgggtggatcacttgaagtcagcagtttgacatcagcctggccaacatggtgaaaccccatctctactaaaaataccaataaaattagccaggcgtggtggtgcacacctgcattcccagctacttggcaggctgaggcaggagactcgcgtgaacccaggaggtggaagttgcagtgagtgaagatggcaccgttgcactctagtctgggcaacagagaaagactccatctcacataaaaaaaaaaaaagaaagaaagaaagaaaagaaaaaagacttaagaactcaccacatgccaggctttatccatattgattcactgaagctttataatagtcctgtgaggtaggtgctaatatcatttctattatacaactactgagagtttaagcaatctgcccaaggccatacaactagtcagcagctgaaatgagtttcaagtgctctctggctctagagcctatgcctgtaacatctcgtttttggaaatgcatcatgtttgagtgcctacttggtattagactctgtgctgggaatggggaacaggggtatgagctaagatcactgccccaaaggagctgacaatgcagatgggaagagaagtgcatagacatgaaaaggataaatcactttcccagatgaaactatcctaaactgattggattgtggacagtggattcgacgtatgtacaaggtatttgaaaaaccataaagtgtgttgtatatataaaatattagcagaattgttataataataacattttatttattttgaaggagggaaaagatctggacagaagtagtgactgtagataataataatcttttagtactttttggtttagatgacgattttatatattttattatgtttatttttctctaccaggctgagaggtttatacgattcatattattattattcccacggtctaaatggggaaactgaggcctaaaagggtaaaggattggctaaaaggccccacagctagtacgcaattgaaccagaactgaaatccaggatttctgattccaaagccacgccttttcccctagtctctcctgtcccttaaaggaggcagacttttaactgggtgaggggaacaggaaggaggttctaggcttagggaactgagggatcattgcttggaaacaagtcttcccaggatattttaggaaggtcaactgggagagccaggccacagcacaggactggggtggggtcgggggtaatacggaggtgaaggcagaagtgggctgtgcttatttgtgatggattttcagtgcccaggaaaggagtcaggcattattccgagatcactgggaggccttttgaggtttgtgagcaggaaagtgggcagattacacacacacacacacgcacacatgcacactcacgcacacacacacatatgtatttgaagatgagtctagaactggtgatatgatgtaatggtggcaagagaacctggcggcctagaagcaagttgtgactattgaaaaaatcttggtgtaaaacttccctagatgattggacaggttctgatgactcgtgggggcaggcaggctgttagatgcttagactttacccctcaatgcccctgcgctttcagatctgtgttaaaattccccacagcaccgcagggtggctttcgcagtggttgtgagtcctggtggctggtggttctgagtccagccctggtggctctgattctgccatgcagagtcagggagaagagcattgcgtgggcttgtagtttttcttctacactgtcccatttaggcaaagcaggaacagtgaaatttcaaaccccaagtggtaaaagaagtgtgtattagggaccaagtgtggtggttcacacctgtaatcctagcactttgggaggctaaggcaggtgtatcacttgaggtcagaagttcgataccagcctggccaacatggtgaaaccccatctctactaaacatacaaaaattagctgggcatggtggcaagtgcctgtaatcccagctacttgggaggctgaggcaggagaatctcttgaacctgggagatggaggtggcagtgagccagagattgcaccactgcactccagcctgggtgacagagcaagactccatctcaaaaaaataaaaaaaagaggtgtatattagggcccatttaagacctttgtgagttctaggcttattttttgaggctctaccccatattatatcaatatattaaaatctactcagtgtatattaacaatcacttacactgaatataaaaaataatcggccaggtgcggtggctcatgcctgtaatcccagcactttgggaggcctaggcgggcggatcacgaggtcaggagatcgagaccattctggctaacacggtgaaaccccatctctactaaaaatacacacacacaaaaattagccgggcatggtggcaggcacctgtagtcccagctactcaggaggctgaggcaggagaatggcgtgaactcaggaggcagagcttgcagtaagtggagatcacgccactgcattccagcctgggagacagagcgagactccgtctcaaaaaaaaaaaaaaaaaaaaaaaaaatcatggttaagtcatcatagttaagtgtttgcagaaaaaatttttaaaaaattggtgtaaaatgaagagggcctcaattacagagaataaaaatgaagttcaaaaggaaggagagaaaactcaagaggtcccctaaaggcaggacccaaagggctttgatgactgccgagtttggggggcgaggagtcgtcaaaggatcctgcctgtcatgcagacctcatttcagcctggaatctagggccacgacaccagcccagaggagacactgaactggagaaagatgagtgtcgattttggacatattgagcgtgagatgatgtggcagagataagggttcaaagtttaaaggagatgtcaaggctagagatgtcatcctctatgttgggggatatcatttgtctagaggtgataatttaaactcttgtgaaagtttagcgctcacaggaaggctaggtgttgcggacatgggaagaggaaatgaaaacagaaaaggaggaaaaaagtaaataaaaataaacgaggttcattctgcaagtaagcaaataccaagtgagaagcagtaagatcttgctggagtcagaagacctgagagagtccccagcttacttctgccattttctgactggggtgagcccccctcccttctcttagcaactctggagtctttccccttcagctgcaaaatcagaaaaaatttttctgtttctgtccaagtcacgagaatgatgcagggacctaatgaaatcctgtctatgccatctagatgtggctatctctgtgtgcagtctgcttctatcccatcccaaactgtacattttcatgtccacccaccctgacctggtctcagcatataatccaccatcccccaaaatctaaatgagcaatgcagaatttaccaaagatattttaggggagacatagaagaggattatattacatacctcagaatacattatctgtttccatcagaaatgtctgttctacaaagtccattttttctttacactgatgctggatgtcttttcctttcttcctttcaggaatttctctgcacccctagggtactcagttgatcctctattatgtggaatcatttagctctgccatagacatgcatttctactcttctggttactcagcaacataaaagtcatcaaataaagaagaccactttcatctttagaaacaagtttggtcaccacctatttttattcatataggccctttttcagggggaaagggactcatctttttctttcttttttttacagctgtattgaagcataattgatatacaaaaagctatacacacttaagcacacaattttatgagtctggacatatgcatgtaccataatcaaggtaatagtcatatccatcacctctgagagattccttgttttggggtttcatcatctctatttcatcactattcccccaagtccacagctcccaccccacactatcagcccacctctctcaaacctgagaggagttctatgactggaaattttcttcagtcttattacaaaatcatttcgtctactcaaaagtgaaggtaactttattattagtgtcaaaataagtcaagggaagtgatattttcaagagagaggctatcatgaagagtgctacagagaagctggagaaagagaggaccaggaacagggcattggattggccagggaggtgatcctgacagcaatgtcagcaggatggtgggggtggcagaagggattaaggaatgagcaggtgttaaggaggaggaaaaagtttttctgattttcctagggacacatctcttcacaaatcactatttaagatgctttcagaggaaatgtcaatgtggatagcgcagtgggaagaaggaggcagtagcaaggccaaataagactaggaaaaaaagtgtgattgaggtcactcctcagaaggctacttgagaagaaagggcaattaattgtgctaatagtgggatcatacctcaccccttacaactcaggctatctcagggcttatgtaacagatgaaatttcaaaaagcagcaggacgttttccagccaggaacagaaatttctgagtgaaagtcacattggtgaatggcccccattcatatttgaattgcctaactaaagatttgaatgataatatagattctggaactaaaggaggctttgaatattgtctaaagtaactcctaccttacagaatcagaaattgaggttctagacagtttatctaattcatgctaagcataaaattagtcccctctccattctactctcaaactcaacagagcaagtttggaactctttcaaatagaatatataaacttcttcactgctggtatttatatactgaaaatgtgcaaagcaaaaagttcataggggttatcaaaagcattatttaaattgattattaaatgtcaatgagaaaagagacttatcacagttttgtaggtgggaaaactgaggcttggtgaggataaatgactaaccatacggctaataagtggcagagtgagagctaaaacaaacatcttttgactccaagtccagtttgtattttcacttgaagacagctgcttctggctttacaagatcctgtaagacactaatgctatcagaattatacatgcttctcagaattacacataaactaggcatccttcaccgaaaataacatgaagagattgtgtggatgacctgagaacattgtgttcagagaaaaaatcctaccagctaggtctgttcagtaaactggagactttccagcctggcttcatagctttgactcatgtctgtgagagttaggatctcctgctgtttgcttcctaccttggggtctatttgctgtgttttggttacttcagctgcttaaaacctcattagagctaaggaaagcatgattgattacttttaactactaccactgaggtcttaatgtgtcctaaaaaagcttgttggatgcagtaaaagtatgtacttatatcattaaaatctgcatgataatgcagtcactaagaatggaccttgacaatcagaatgctgggtcacaaattctgacttcactatttaagctacttgaatttgggcaagttacttaatctttgtcagcctcagttttctcacctgtagaatgggaatgttaacagtaactcaggaggttcttgtggcaattaagtgaattaatgaatgcatggcaggttactatttggatgtgacatgatagtttgggaaaggggagagtggttgaggctatgtcaacagagaaccttgtgattttgaaaaacatgagctttcttcggtgaacgcaccaaccactgacagtggcagagggctttgggagccaagtcaatgtctccaatgttgttcatgtctttgatgctgctgtctggtgaggcccaccagctgccaaagcctgtccactgtctttttagtcctctcattctacccagtatatgtagccaattttctgtgtagattcattcctccccacatagcagtaaaacaaaacagggaagataggagcctggatatctgaaagtaggtgaccaaccatgccaatttgtttggggctaagggagttcttgaaactttccattttaaaaccaggactgtcttgggcaagtggtggtaaattcatcactatacctgataggttgttggagggtatcatggcaaagtcctcaaaatatctacctaaattttggtttaaatcttttcacattttttccatgtttttatgtattcttttttgtttgtttgtttgagacggagtctcactctgtcactatgctggagtgcaatggcacgatctcggctcactgcaacctcctgacaagacaagcctgaccaagacaaggatagatggaatcagtttgagatcttctagaatgatccaagctacaatgatgatgaaattcccacctggaactgttaattgcaaaactgtaatacatacatagggcttagcagagagctagcaacatggtaaacatgcattcattcattcaacattcgttgaaaccttaccatatgctgggaggattttaagtactggagaacaaaatagataaagtcacaaacagatatatcaattaaagataaatgctctgaaggaaagaaaagcaggataaggaaacagtggctgtgtggggaagtttctctgaagaggtgatatttgagcagacacctagtgaagtgaatgagtaagccatgaaaatatcaaagggcgacagtatttcaggcagaggaaacaaatgcaaacgctctgggagatggtgggccagtggggcagagtgaaccagtagtagggaatgtagtggcagaggtaggcaagagccagatggtttagagccttggaaattaaggtaaggacttcgggtttcaaatgtcagctgttgttataaaggctgtttttttcctcctttttctgtgttgagtgttggatctgttaactgctctttttctactcaatattggttcattctgtccaacaaaatttattgaatgtctgctcttcattcaacagaaggctaatgaagacattttttcgggaactgaagagaaagtttgttttctcaacaactatgatctagttgtgggggggagggagtgggtcaaagtgctgataatgcgtcaaaagacggcagcagtgcgccgagcgcggtggctcacgcctgtaatccagcagtttgggaggccgaggcggcggatcacctgaggtcgagagttcgagaccagccgaccaacatggagaaacgccaagtctctactaaaaatacaaaaattagccgggcgtggtggcgcatgcttgtaatcgcggaggttgcggtgagtcgagatcgagccattgcaccccagcccgggcaataagagcgaaactgtctcaaaaaaaaaaaaaaaaaaaaaaagacagccacagtgtgctttgaaggagacaccctggcactacaggagagaaacgatgttttcaattgtccagagaggaggggagtcacttccggtgcgtcccagggcatcatgggaagggtcagtctgtgggaaggaaaggccagaagtgactcctgccgtagctgcggcaggcctggaggccgtactgggacctggccagtaagtgtgcatttaagagtttgcgagtgagcaggaccttgttcgtccccgcgatttatttgtgctgtgtaattccagacagtagatccgtgaaggactgtgtggtggggagggtatgaaattgagtgtggagagggcatttgagggcaagtcccatgactgactgggccagacagaaaatttaaaattcttgtcaacaaagcccgtttgaaaattttcagtgcatacatagccatattattatgttgtacatgtggtacacataaatattcctgtttttttttttttttttttttgagacggagtagcactcttgtcgccaggctggagtgctgtggcgtgatctgggttcactgcaacctccacctcccgggttcaagtgattctcctgcctcagcctcctgagtagctgggattacaggcacccgccaccacgcctggctaatttttgtacttttagtagagacggggt[136 bp omitted]agatactcaaatccgtgggtaccaattgaattatttttccaaatagtggaaaaagtgatgattttgttgctcagaaggtactacctttcccatccatgttttaaacataatttctcatactttgagccttcacactgcgcagtacctcagtttccccaggaaagccacaagccatagtttctgtgaggagctgagaagatagtttgccctcttgtgaaggtcagcctattggaatctaagagaagccctgttttgggtgtgttccccaagggagatgtttttctccttcaccatggagaggctttcttttttcttgcggcctccggaagcggcatcttagtggcccttggaactaggagggaggaatcaggctggcaaattctatccttaagcaaggttctttccatctgcccacggctgattcttcagcttctcgctttggaaaatgtgaccgatggagtctgcgatgacggttcctagggacaccgatatgtggaacatgtgcccaaacctctgccacagccaggaggcagaatttaagtttgcttactgacagctgctgtgtgtcagtcctggaatgttaatccttacagagagcttggatgacaggcaacagcttttagcagctgtgctaatgatctcatccatcaaacgaccctctcttcaccttactgttgtcagttatatccacgtctttgatgagaagtggatatgaaatcttaagaggcaggttacttttatttattttaaaaacatgagcctttaaaagaattccaaaaatagtacacacattgaaaaacataatcaaacatactgaaggaaaattttaaatcttgcctaaaattttagcatagaagtcatctctacctaaattttggtttaaatcctttcacatttttttccatgtttttatgtatccttttttctttcttttttttttttttttttgaggcggagtctcattctgttgctaggctggagtgcagtggtgcgatcttggctcactacaacctccgcctcctgggttcaagtgtttctcctgcctcagcctcccctgtacctgggactacaggcgagtgccaccatgcccagctaattttaatattttttagtagaaacggggttttaccatgttggccaggatggtatccagctcctttttttttttttttttttagatggagtctcgctctgtcgccagcctggaatgcagtggtgcgatctcggctcactgcaacctctgcctcccagattcaagtgattctcctgcctcagcctctggagcagctgggactgcaggtgtgtcaccatgcccagctaatttttgtatttttagtagagatggggtttcaccatgttggccaggatggtctcgatctcttgacctcatgatccgcccaccttggcttcccaaggtgctgggattacaggcatgtgccaccacgcctggccaatttttatgtattcttaaacacatacacaattgagatatcagtctgcaagcactgttttgtattctgcttttagaacacattttaaaattttctcatgatattaactattcttttagattatgatttttaatagttacgtagtgtaccatgctttgaagataacataatttatataacaaattttctattattgggcatttagggtgctctaagtttctgttctttaaaatattctgctaagtatatatgtgtacataaatgcttatgcatatctttaattgttaaatctatagaatagactttctgggcaaaggctaaagatagttttcagtttgcaacagtggagtccctgttattggagccttcacaataatgatattgcataggaaaacaaaaagtattcactaacgatcttgttgatcattatgtattgtaaatatgcaataatcaatttaagttgaatgcaaagtaaaatgagaaatcttggaacagttgcagaatttagtgaagtcagtgaaagtagtaaaaaaaattggcttgagttttgcaaagccattgaccagcgtgcattcagcagtgttgaactagttaacaattgaagaactgaaaatggacaaaaatgatgacccaatagatgtttcccgagaatgaattcaggatcaaaggattaggaaggctcttaaaaatattgatgaagtcatgcatttttgtgaaaaaggatgtattttattattgcattgcaaaacttaaaggatgtcatattatgttatcacatatgactgtgagaaatctgtcccttttgtcccaactgcaacatttactcattctttgttctaagaatagcagagttgcaattatgatctaaatcttaagaaatgcaacagaaggctgggcaccgtggctcacgcccgtaatcccaacactttgggaggccgaggcaggcagatcacgaggtcaagagattgagaccatcctggccaatatggtaaaaccttgtctctactaaaaatacaaaaattagctgggcatggtggcacgtgcctgtaatcccagctgcgcaggaggctgaggcaggagaatcacttgaacctgggaggtggagtttgcagtgagccactgctctccagcctggtgacacagtaagactccgtctcaaacaaaaacaacaacaacaacaacaacaaaaaacaaaaacagaaaaaaagagaaaatcaattgtttctctgtatgttagcagtgaacatgtagacagcaaaattagaaatataatgccatttacagtcacttaaaaaaagaaagaagttagacaggccgggaacggtggctcacggctgtaatccgagaactttgggaggccaaggtgggcggatcatgaggtcaggagtttgagaccaacctgaccaacgtggtgaaaccctgcctctactaaaaatacaaaaattagccagacatggtggtgcacgcctgtaatcccagctactcaggaggctgaggcaggagaatggcttgaacccgggaggtggaggttgcagtgagctgagattgtgccactgcactccagtctgggcaacagagtgagactccgtctcaaaaaaaaaaaaaaaaaaaaaaagtttgacatagatctaacaaaatttatatatggcttgtatgctgaaaactaccaaacactgatgaaagaaataaaagaagatctaattaaatgaaacagactgtagttaagaattggaagattcaacatagtaaatatgtcaacaaactgataaacaggcttcatgcaatttctgtgaaaaagtatagctctggctttaaagtttggcatatagtattctaattactaattatcttcccagagtactgtaattgtgatatttcccctaatgcagaattttaaatttatggaggtataattgacatttaaaagtgcacatattaaaagtgcacagtttgataggtttttacatacatagatgcctgtgaaaccatcatctcaatcaagataatgaacatgttcatggacccccctcccaaatttcctcctgctcccttgtaatcccctccaccctttctttgtgccccctacaaaccctccctctgcatcactagccaactgctggtccactttctatcactgtagttttcattttctagaattttatataaatagaataatatagtatgtactttttggaggggctgctgctttcaatcaacgtaattatcttgagattcaccctttttagtgttaatggtttcttttgatagctgagtagtatttcattgtatggatataccataatttgttacccattcatttgttgatggatattttggtttttctttttggtttttgcccctattacaaataaatgtgccataaacatttgtgtacaagtcttcatgtggacatacgctttcatttctctttggtaaatacctaggaatagaatggctagatcatatagataatttgttaacttttaaagaagttgccaaactgttttcataagtcattgtaacattttacattatgactcttggccaacactttggtcttttagtcattgtagtaagtgtgttgtggtatcttactgtgttttaattgatatttttctcatgattcatgatgttgaatgattttcagatgcctttttatcatctgtatgtttagtgaaatgtttgtctaaaccttttgccttttaaagtattatgttgttaccttttccctggatttttagatttgtttatatattctgaatataaatctttcatcagggatataagttgtaaatactttcaatctgtggcttgtcttttcattctctctataacagtgtttttcaaagagcagaagctttacattttgatgatgtacaattgatcaattttttcttttgtggcctgtgtctttggtgtcatatctaagacatctttgcctaagctgaggtcacaaagattttttcttttgtttctttctacatgttcttatgattgtagttttgatttcctctttgatccaaaattttgttttttggagattatttaactttttttttctcttttttgttttaaacttttgttattaacttagacacatttgagattgcggtctacacaatttataatgaaaagattgagggtgataggggtttagaggttgggggagagtaaatgttagaaggtagaggaaggagtgaataaagtacagtctttgtctagatttcatttttgttctgctgcttcctctctttctggaggttctactccatcaagcctttttttggtcttattttctgtccctcttttataagttcattctttcactttgtctctcatccaatctctctgacaatcctatgtatgctagctaccttcaataaatctggaatccatctacttctctttgtctcccgttgttatttttctgccctaagccactgtcatggtttttattgttgttgttgttgttagtttttttgtttttttttttttttgagacagggtctcactctgtctcccaggctggagtgcagtggtgcgatcttggtttattgcagccttgacttcccgggctcaggtgattctcccaccttagcctccctcgtagctgggactacaggcatgtgccactatgccctgctaatttttttctttttttctatttttagtagagatggggttttgctatgttgcctaggctggtctcgaactctcgggctcaagtgatctgcccacctcgacctcccaaagtgttgggattccaggtgtgagccaccgcgcccaactgccactgtcatcttttaacctttatttttcagtaggctcctaactagtttcccagtgtccatctttgctcccttagtttattctcaacacagcagccagagtgattcttttaaaatgtttgttaatatcaccctgctcaaaaccctccaaagctttcccacttcactctgagtaaaggcaaaagtccttagagtggccaaggggccctacatgatctggtctctcagttcctctcttatgccttaactgtctcatcttgctcagtctcttcctgccctgcttgacctcctccctgcccccctaacattccctacctgcccttgccttagggcctttgcattttctgttttctctgcctggacgtgctgtgcgcccatatactcacttggcttaccctcttgcctccttcaggtcactgctcaagtgtcttcttacc[355 bp omitted]actttctaatttcccattagtacttataatctggctcattacatagttatgaatttatttattgcttttctttcgttgtggaatataagcttctagagagcagaaactatattttgttcacacaaaacttaaatagtggctggcactatttattgatttattatattgatgcacatagtagatgctcaatatcgtttgtggagtaaatgaatgggcccatacagagggcagcctcagggagtgtttttcttagtaatttgtaacaatctagagagatataataaaaacaagctcagcaaaagatatttgtgtgtgtgttggtggggggtgaagaggtgggaaagggactgttgggtggtgctgaaggtataaaatattgaatgctctgcaaagccatatataatattaagatattaatagctaggtgagaactgtgagcatgaatagctttgcaagtgaaaaaatgaaagtccggtttaatgtatacatttactgtagtttttatttattcagctttaacaggaaaataaacgtcataaagcaagtgaccaaaaatagcacattttgtgcctttcttcagcctcttgatagcatcaggcaggtgtgtttactctgcactgatttttgtgtgaacctctcggctcttcactcgcaatttgttgacctgggactcagcaatgtcagcccgttcctcggcctcctccagctcatgctggagtttgcggaatttagatagattagcattggattgttcctcctaagaatagagataaaattgtgagaattagactgtgtggttctcattgcacttatcaccagacaggattagttcctcaaatcaggtatttccttcttatggtctatttagcatatccgactttaaatctaaacagagtttataacttcaactacaatttttactttaaagaatgaaaggagagttttgaagtggaggagacagcctcatataaagcccatacatccttttatgatttatgttctgtgtggaaaggaggaagagacctatgtacacttatagacatcagtaagtaaatgtaaggccaaattataattggggaaataccacttaatatatattttgattctagtatataaagaaagggaaaagatgggactagacagaaagtctcctctgttaattgactcattgccatttatgcctctcccttttttctttccttttcttcctatttacttcctacctatcacatgtgtctggaagagtggagggataaccaggaagggtataggtacagaatcttctaacatgttcttatattagctacagcaaatgtgggggcaagagcccccactgatgacactagtggtgagtgaagaagtcaggtggggtaaaagattgatgtttggcttttgagaacttgattttttctatgtctagagggagaggaatatttatgatggtattaattagaatttctactgtatatcatttgtagctatcaagtaagtgagctgtttagaacttgcccccctcaaccc[132 bp omitted]tgaagccctgtctgtactaaaaatacaaaaaccagccaggtgtggtggtgcatgcctgttgtcccagctactggagaggctgaggcataagaatcacttgagcttgggaggcagaggttgcagtgagccaagatcacaccactgcactccaacctgggtgacacagcgaggctctgtgtcaaaataaataaataaataaatcttttgaagtcttattctgtaatttggatttggcgggacaaattcatatttataaaatcatccctcttaaaatgagtggtagattttcactttgtcttcttccttattgacgcattctcttaaaacactttctactgcaaaagaaatttccttctttcctcaagggcttaaagatacttacagcctcctcagcttgtctcttgtatgatttcaccttcgcctgtaatttatctaccaagtcctgcagcctgagaacattcttgcgatcttcttcagtctgaaagtttgaaaaaaataatctgcattcattccgaagagataaggctactctgggtactaaaataaaatcatttggcatgatggcaggtgggcctggggtaaacttgatcaactctgagattttcttcatagaattaacagtagcactcttggtaaatgtttccactgtgcaggtactgtattagagaattgcacacatcctctccagtccttacctccccatccgggaaaatagacactgttatctctattttacaggtgaagaaactgaggtttagagtgttaagttcaagaagcaagagaggccaaactaggactaatacccagttaatctgcctttaaaatctgtgttctttactgtcatgctattttctaaactttagaaatctgaaggcctccctaagttttagtataggtctgtgataagcaactgtctttactccttacatgtaccaagttaatgcgtatttgtttgtgagtggcatataaataaatagtcataaggttttcaatttccttctgggcaggaagagtggatattctggaaggctattccctttacctggtaggtgagttcttttactcgtcgctcatgtttccgtaaacctttaacagcctctgcattacgtttctgttcattttcaacctctccttcaagctcacgtacctgcagccaagaaaaatacttacgcagtcagtcttgggggatattaattagcccaagacctactgaaggcatggggtgggtgttcccagccccaggacaggatgggagtcttgtgtaggaagagagaagggtagagagagtgccctttttcccttcccagatttagagagattgagacacccaccctggcctccagtttctggatctgcttcttcccacccttcagcgccagctgctcggcctcatctagacgatgctgcaggtccttcaccgtctgctccaggttcttcttcatccgctccaggtgggcgctggtgtcctgttccttcttcagctcctcagccatcatggcagcctatttaggaaataaattaagaaagtaatgaaacttgatgatagcaggtgcatacgtgtcagtaggccaaatgttcatcttacatcagtgatggccttcttggctttctcttctgcattgcgtgattcttggattacttcttccacttcactttggagttgggaaacgtcattttctaatttcttcttggtgttaatgagactggtattctgttaaaagtagtcgtggaaatttacaaaatttgcagtttgccctcttgggattttacaagtgtcttacttgttggttcgtgcaggggatctgctggcaacatttcactaaactttaattatttgttcagtggaaaatgttaattatttgcaaggtaggaactcctttcccccaacttccccagtgtccacctgatttatgcataaggacttctgaggtttgagaatgcctttattggcatacattagttaattgttcttttaattatatttcagtcagacatcactagttattctatctctggaaggttggaaatagaaaagaatagattcgttttgtgagtggcaggcactgagagtttcttgctttgaaagaatctattctctctgaatttttatgatttgttctgtcggagagcactgaatttgtcttatgaaaacatgttcttaagatttcaactcagtgtttctagagagaagcaatatcgtctcaacaggtatttgaaaatgtttaggggcagatatttttggttgtcaaaatgactagggggtgctactgcatttaatgcctgggcaggttaggaatgctaaatgagctgtaaggcatggggacagtgaacacagcagtgctaaatgcttaagtgctaccaatgagaaacactgcatggaacattttcagattttggaggcaacaggtatctttactcaatagtattctacctcatggtttccaaaataatctaaatagccaaatcttatttttaaataaaaaagtaatagctttttttttttttttttttttttttttttggtgaggggtagaaaccccaagaaagaaacaggaacacacaccaaaaaaacaaaaaaaaatcacccataatccaccaattaccctaagataatagcaatgagtatttttgagcatatcccccatccatgtttacatacacatatttatacaaattgagtactttcatgttataattcgaatgcatcagctaccagtacaccagcatttgtttgatgtgagggtctcacctgggtgtggaggagctggacacgctcactggcatccaggagctcctgttcggcgattttcctgcttctctctgtctgttccagagtggcccacagctcctcgatctcagcctgcagcaggttggctctgcgctccacaattgccagctgttccttgaggtcctcctggccccggagagcatcatccaggtggagctgggtttcctaataagtgaaaaacagaaaggccttaagtgttctgaagaggatttgaagatcccaggagatgaactgggagattgtactggtgacaggaacagaagatgacatatgcctgtcatttgaatgcatctgattatggttaggtcatttgcttagggtgagagagaattatcaggagacatagattcttgttctatttctaccattaactggttactgtgtcatgtgtgagtcactaatgtctgtcatttgtggagcagtttccatatgctctatcaggacttgacatctgttatttcatttgatcttcacagtaactcagtgaggtgggtagtttcattcttattttgaagaaggaacagaggttctgagaggttaagtaatttgcttaaaatcaggcagctagtaaatgacaaaactaagactcaacctcaggcctgtctggtgcccaagtctgttcactttctttcatatcatactgtaatgcctaggcatctgtttgttcttctacataacattttcttaaaaataatatgttctatgtgtatttaattcagttacctttgtgcggtcagctgtataatttgttaagagaaaaaaaggatcgtttaacaaggtgtttgggaaatggaagacaggtactttccctgcttcatctgggaggcgaatgtggacccgtttaccttcaggattccttgggtgttcctgtagttccttaaactctctgcagctaagcgattggcatggttcagctggatttccatttcattcagatctccttccattttcttcttgactctcagagcatcatttctgcttctaatctctgcatccagcgtgctctgcattgtctccacgactctagtgtggtttctcttcagctggtcaatttcctcatccttttctgcgatttttctatcaacttcagacttgacttggtttaactcaagctggatacgcagaatctttccttcttcatgttcaagagatgccttaacaaaacagtgatcaattaataatggagaagaacctgagtatttggagtatattccctcgtgagccaaactcttgtcaatatcagtttgtctaattttacaaagtataatacagtagttctgggaatcttctaggtaaatcattattttgtttatttagtgacagattatatagggcagctctgcaataaaggtgcattgtgctatacaaatattgttcatattaatactaataaaattatataattaaattcatgtatagtaaatataaattctcaatctgttttagaaattaaaatgttcttgtgtgatatactagcccctgacctagaaactatcagttttaaaatgttaattttttttccgattacataataaatgttcattgtataatgtggaggcaatacataaaaccaaaagaaaacctagctgttgttcccccagtaaagagaaaaacattttaatatggtgtattttttctagtcttttttcctacttctatatatttttacataatcaaaattatattgtatatgcaaatttgtgtctttaaaattactgtctaccgtaaaatatttttccaaaataatcatatttcatggctatataaaatttcatcacatgactgttctgtgatttgcttacttttgttcttagattgcacatctttgccttaaagctttactccatttgacatcttttgggtgataaaatcttagaaatagaattgataggtcagagtatttacatttttaaggattttgataactattgccaagttgtccttcataaagatcctgtgagtttaaattatcactagccccacttttttttaactgatgtttgtctttgtttttccataacataatacaaggtaatatgtacctctgcttcctctaaagcagcctgaatttcacatttctcttgttctacttgcttctttattttctccaattcatgaatttgctttcctccctctgcaatctgctcagtgaggtcagaaatctcctctgtggttgaacagacaggagagaaatggtcagaaagatggcaacatggaaaggtcctcccagggatatatggagtagggaggactgtgaggactcacgttgcaagttcttattttctcttcttagcgtttcgagttgatccagggattcctcatagacattcttcaccttgaacagctcagtgctaagagaacgtgactccttctgggaggcctcaagttcagcctgagtttcctcatacttctgcttccattctgataggacctgaaaagcaataaatcatgagttgatccaaggagaaaggaagaccgagtaaaacactcttaaagtttaagcagtctgggccaccttgtcaaagttcctttgcttcttatcaagggctgcacaggctgcattagacctttccacatcaagcatgaggtcttcaacttcattctggagccgctgcttcgtcttctcaagggaagcacatttggcgttcacagcttctacatgttcctcagcttcttgcaggcgctgggccaactttttcctgaaaagttagccaggcagtcaggagaatggccaagaccagaagcaaagtgataacctccttggtcccttttcacagtcctatttcttttcttttcttttgtttctttttttgagagacggagtctcgctctgtcgcccatgctggagtgcagtggtgcaatctcggtcactgcgacctcccgggttcaagcgattctcctgcctcagtttcccaagtagctgggattacagatgtgcaccaccatgcccagctaatttttgtatatatgtatatttttttttaaatagagacagggtttcaccatatgttggccaagctggtcttgaactcctgacctcaggtgatccacccgccttggcctcccaaagtgctgggattacaggtgtgagccactgtgcctggccacggtcctgtttctatactggcaaatggcatatgattttcaaaacggtggcagccagaactgctttctagattggtaaactgtatggaaagatccaaagtggtgaagagttggaaacaagtcctgggaatattatagaattctaagaggctgctgttagtgctgccattgtatgcgccttactacctaagtaactcaggattttcaagacttctgattgagtatgactgtggaaaattattagccaggacaatcttgttgtttgacttatatatccattctcactccaatatggatttgaggttaactagatattttactggccagaaatatactgagcatattcatttgctttctcagacttttcattccattttatgtgtttttttcctagagaatagccagtttcttctaatcattatagttggacaatctctcctgggaaagaaactgatacataaatcaggacaattcgtgcagtttaaacaaaggcaggttttttttccctcctgaattctctacattctcagttcattttcagttgtgtgccaagtacacatccttatggtagtgaaaaacctttggcttgatgcccagggagatctacttgaaggtctccgtttgtctatatgcagactaaggcttcactttatttaggccaaccctaaacattatgtatggtttggtggcctccaacatgagttttaagaggtatgtcttctactcagtgcttaagaaggtgggctgtagaatcagaatgacaggctccaaacccagctgtatcatttattaagcagatacttttgggttagttggttaacaacttacagcctcaacttcctcatctgtaaaatggggattagaataatgataccaatataatattgttatgaaggtaaataagctgatatacatgcatacattatatatatataatacttgacacagtatgcactcaataaatgttagcttttgctattgttatgttatcatcatcataaatatcacagctgcttctgggagttcctcttctagagttcacagcacatacttggcctcctccagctcctctgtgcgctggatggcatccgtctcgtatttggttctccactgggcaacctcactgttggccttggacagcgccctctgcagctcagctttgccttcctgctcttcctcatactgttcccgcagcaggtcgcagtcatggcgggaggactgcagggcgtgtgccagggcgttcttggcctgcagaagtagcagttcagtgacataaattcatgtattcagtgatatttaacttacacatcccaagtagagcctaactgggcaggtttagatttggttagtcaaaaaaatccttggcaaaactcactttagtttcttcctctagttgatgtttcagctcttcaatctgctgagtagatgcttgcttgctccttgaaagctgagagactaaagcatctttctcatctaattgtcgagaatattcacctaggaataatagacataagggaattttttactggcataaaaataagcctaaaccttttacatttatatatgtgtgtgtgtatatatatatgtatatatgtgtgtgtgtatatatatatatatatatatatacaagttgtatataccttacctgaaatgcttgggaccagaagtgtttcagatttcagatttttgtttgattttagaatatttgcattacacttgccagttcagcatccctaatccgaaaatctaaaatctgaaatgctgcagtgagcatttcctttggacatcatgtcagccctcagttttgaattttggagcatttcagatttttgattttcagattagggatactcaacctgtgtgtgtgtgtgtgtgtctgtttgtgtgtgatgtgtttaatctacacttcatctgcttctaagtatttttttagcactggttagaaccggagatttaaaagcagcattgccatagaagtgttgtaagtaaacttgtctgctcagtcttgacttctttcctttttgaccttcttagcaaactctgatcatttgtttatctttctctaaagtgggaatattgctatttattagaacccctagaatccattttatttagtccatggtgttgggacccagagaagatgtctttacccgcttctgtctgcaggcgcgctctctgtgctgtgaggtcattgatcagccgctgctgctcctcttccttggtcttaagctcactcacttgatcttctagagagcggcacatcttttcaaggtttccctacaggatatgtagcaatgaaagatgagacattgaatgcaataaaaaggttaaaacttgattcttaaaatatttgtagagtaaataaattcatgtcaagtgtgagtagaaagttaggacatcaactctgtggaacatgcaagaatttaggcatggcgagtgcatagtgtgcctaaactggtcattgttggagaccatttattccaatgatattgacgcttg[212 bp omitted]gaggcaggagagtggcgtgaacccgggaggcggagcttgcagtgagccgagattgcgccactgcacttcagcctgggcgacagagtgagactccatccccccgctccaaaaaaaaatcatcttaatcgatcataaccagcattttaaaaaataccatagaatgggatatatttggttagaaaatatttgagtagtgctgtaaaatgcctgcaaacaatgtttagtgatagagaataatgggtgttcttacagatgattaccttcatttagagacagtattgggtaccttggctttggaaatggcctctgcgttactgctgaggtcatcagtctccatcttcagctcactcttctccttctccagcttctgtttgacccgctgcaagttgtcaatctgctccccaagctcagccatactgtctgcgtgcttcttccgaagagcagccaccatagcttcatgctgcagggtggcctcctccaggtccctgcgcagtttctgaaactcagcctcccgcttcttgttcaattccacctgagcagaagttgccccaccggcttcttccagcctctcgctgatctcctccagttcccgggagaggtcagagcgctgcttctccgctttggctcgggacgccctctctgcctcgatttcttcccccagctcctcaatgcgggcctgggaatgaaagaagcacataaacataaactcatctcaacttcagtgtttttttggtgtgcagaaaaaatagaggtgagatgactcacctgcaactctttgatcttcttctgtagttgaatttctacagcttgctcatcttcaattttgcttatcaaattgctgatttcaaattctttcctttagacagaagagcaagacgtattaatactcatgtgaattgaaagatgatatcacatagaagtttttttctaaaaggctcctacttttcaagcttttcatcaagttgctgtttgtcattttccatatccattgtggattcttgggccaatttgaggtcaccctccagtttccgctttgctctttctagatccattcgaagcttcttttcttgttccagagacccttcaagctaataagaaagtaaatatggtaaaaattgaaagtatatatttttaaaaaaatctttcaaagggatatttaaaatgtgcttacatcatccacttgctgttctagcttggttttagctttggtcaggatgttgactttgtcctcctctgcctgcaggtcatccagggtctgctggtgggtctcttggagagccttcttctccttggacagttttgcaatggtttcatccaggcctgccatctcttctgtaagatttttcacctacaaaggttaagaaagagattatttctcctataaagcaatttagttggtggcagaacctctatacagtattgtaaaatatgactgataccttgttctccgtggcatgtttctccttctcaaccttggccagtgtcagctcaaggtcatcaatgtctttcttgagttctgaacattcatcctccagttttctcttcttggctgtcagctcagcattgatctcttcctcctcctcagctctttcagtcacctctttgattttggcctcaagttggattttgtttttaatcagttgctcacacctttcctctgcatcagccaagctatctgcttcctatggagagattcattcagatacttagagtctgttacttattttgaaacttggtgttttttttgcgcaaaaataatagtgttttattgaattctgttgaatttttcagtatgaatataaatttaatttaatcgaacattattacatggtctggagaaatgcagcttattggaagtgagactatagctttagaagcaaactagtttgcaaagttattggattggagctattgattatttaaaaaataatttgtagaagagtggaaagacctctaaatcgggcaaaaggaagcctgggttcttgtcccaatattgtttgcatatgtatgactttgggcaaattgctttattcctttcattctcaattttgtgtatatatatatatgggttggaataaatgattgccaagagcttttcagctgtaatatttaaagattttgatttagttaaattggttagttttggttttgatcattccctgtccccctcaaaccaataattgctaggctgtattgaagaaagaaaaagaagaaaaataatttaaatacatttccatgtagtattttttaatacactaaaaccttcctggtagttcatacagtgctataattgttcaaaatttacatttccatttacagaattacccattagtcttaaggtgaattttattttttggaacttttaccccaacttttattttgaaaactgttaaacttaccgaatagctgtatgaataatacaataaattgccatataccatttacctaaatcctcgtatttttaacattttactgttttttctctctctaaacacacacatagacacatatataggcacatgtgcacgcacacacacacacacactctcctaaatcatttgaaagtaaatggcagatatcatattttagcatttctctcctaaggacatgaacattctcctatataactacaatactgttattacaaatgaaaatattaatcactgatacaataatattatctaatatacagtctatattcagatttccccagtgtaacaaaaatgttctttaagttttgtggtttcattgtttcatttttatacacaacatgggcaataggcctaaactgcaacataattttcagagagttgtaccattgactaggctagaggttctcatgcccaggacaattctagttaaggaaagattgatgaactgttcttagccctttctgcttttgtgtttttgtttgcttttgttttcccattcccttctaaatctggttaatgtggaaagtctatgttgagcccctgaaattttgaaaatgttcaaacccatatgtcaagttaggaaaaaaaaatagaatgaacagtgatatgttatgaacctagatttaccagttgctaagttatgccacatttgccttgtccattccatttgtggccctctcccctctcccaataattatcaaaatgaattttagaatatatgagaaaatgtaattctcagaaactgtatagctcaataaagtttttataagtgactaatgaaaggattcaaataaaaatcaatccagtctaatttattaggttaccttggcctggggaatattttttaactcccagtgtttgttttgttcttgagtttaaaaaacgtttaaatggaatataatgggaacttattgggggattcttttcttttttctttttttgagctttactgcttaatatatttatttttaatagtgatacactcaatacatatttactcactgactaatgataactgtgaaaagatggtaagatagagaggctatggtcctgtgcttttggaaaaatgtaaccttcatataaatgaaggtatcagaaggaaaaattgaaagttgctgaaaaaaagtgggaaaactatccttttcacaggttagtttatgatattgttaggtttgctgaaccaaggaaatgggaggttacctttgaccaaagtgttcatgccaaacctactccccaccccaactgcccctccttcctgcaccaataaacagactctaggaactagagatttgtatcagaggaagaatcaggaggacacattgctctgcctgacatgctggtagttcagttccattaaatacagatagatttattgagctaaatcttgggggttggggaaaggagatacagaaataaataagtttgaatttaaatacaatctcatagacttgcatttagaaaatagagctatacttttaatgctgggctaaagtagcccaggcaaaggggtaaaatatttgactgagacttgggggattggctttaagctacttccttcatggctgttaaattttgtgatattatttaaacaaattcttcaatctttccttttcccattgtaacttggaaataattgtgccttttcttccccatagaatactaaaagataaatgaggtattaaaaacagcaacttgagattttttttcaagtagagatcatttgtaaatccaaagtatatgtgtgtttcaaaaaagcttcagtaacatggtgcattcagaatatggagtactcacagattgaacctggagttgcaggtcatttttctcttttaagagagtgaccattttttcctctagctccttccgttttgcctctgacttggcgagttcatctttggttttctggaattcttccttcatggtggccatctctttctcggtctctgcactcttgaggaggggcttaatcttgaaaaagagtttcatccagggccagtgcttgacgttcatgaaggcacggacattatactggatgcagaaaagtgcttctctgcgatgacatgaaaatatcagtgtagactaatccatcagagccaatgttattgttacttatcacacacaaatttcccttttaatgaatgccgctcacaaataaatatgtcacattctctatatattatatgcaggctttacacacacacacacacacacacacatgtacacacattctcgcgctcacactcatggtcagtagccctcagtataaccactttgctaatatgagtacggttcatattgagcacatcttctgtgttctcaatccctatcaaactagccaagagagtgactttaggggtgaatattttgaatgtatgatcagcacataccatttgacatatgacagtattagtgatttgagggtgggcatggtgattgcatgttgattgtgctgcctgtctgtgggcatatggatgagaactgtgaaatgacataggttgccttctgaatggcccacctaaactgagcgaatgatttgtcatctcttccttgaagttgctcctcttattttgaacaacactgaattatccactctataaactttttttgctagcttcttcagataatacactggcttatctcaaattctttcaagtgcctcagtcttaactgattaattggattgttaatatttgcgaggcattcagcatctgttgagctctaaaatttattttattgaaataaagtgaaaaatagtaataaaaggtacccctactgcaaactatagccatagactggctaggtttgactacttgtagcaatgtgtatgtttcttcaagcttgttaaaatggaaattctatctctataggtccagtttttaagacttgtaactctatgaaagcagataccttgacacaaaccataacgttcacacatgggaaagactcaggaacacttccagtgcaggcctaaatgattacagataagaaaaatgaatgcacagtgtgtgtgtaagtagagggaatgcaatagtgttgggtagataaactgggtgagattagttacagaaaggggaaattaaagttttaaattggtaaatagataaattaggatgaggggagagatgagataagaagataagcaaatgagagattagtagataagcaaattgtttagcctggctggaaaaggctatgtgcttggaaatgatagatgaggtggggaatagagagggccttgacaggcaagcaagcaactagcttgatgaaaatactgcttactgcaaactattcctgtggctgtatgtgagatggctggaggtaggagagaagttttgaaaggaatccaagtgtgagagctgaagcaaaggctgctgtgttgtaggagtgagttctgaattgggtgagaggaactattagccaccaaatgaaagaattaatgaatgaacaagactgattgatagtccttaagggaccttataattctgatattctgaatgattgttacctcctttgcaacatcttctgatattctaccctcattaggaatcccctacagacagcttgtgttcttgttataatttgggctaatttttcatctctcatttcttccagaagacccagaagtccagctttgaagaaaacctggagaaagagagagtcacaaatcatctccatactgcaggagatgcagaaatggcagaaggtacttggatcaggtgtaaataaataacgatataccttggtatgtccaaatttatattgagtatgatcaatatcaatagatgcaagaagtttctcagaagccttcttgctgtcaatgaactgtccctctggaatagcacttgcatttaaaaccttgtatctgctcagttaaagaaagaaagaatggttaggaaaatgtgaccacatgccaacaaaatgacaccaaaaagaaatatcaacaaacatctgagagtagaaataaaagtggaaaatccaactgccgtttaaggacagatagtaaaacaatatgattttctgttgcatgcctgcttcctgttatccttctaacctgttgtattatcctaccaccacaagactatattattcgacttcttaattttttaatacatactaattcacagtgttaatgaaatacatcaaagaagactgacctttgtttgaaatcaccatataagattctgcttgggaatcctttcctacagatgcggatgccttccagcacaccattacacctcagctggtgcaacacaagttcatgttccattgcccctaaaaatatagaacagtacttattagtgggcatttaactttcaaacctgtgcccgtttgattatttcactctctgtgtcttaccaggagttttggtttcattgggaatgatacaccgtacgaagtgagggtgtgtgctcctcagattcgtcatcaatttatttaaattttcctagaaaaccagacagaaaggacttgatgaaaaagttctatttcaggttgttttttgtaattatatggaatgaacctagacagtcctttaactactaggcatgcatctgtgaggcttcaattgctctgtattttgagggtctcaagagttctagcctgccaaataacaaaaaggccaaagtggttggaaggaatgcacatctccaaggtattcctttgtaacaccagggatctgtctcataaacaaattgcaattcagtaaccttgtgatgtacaaggaagggttctcaaccgagaatcacaagacaaaacatgatggctttgctatgccactaatgaactgcctgactgtataaaatccattttttctctgggcattatctgagaatagttgagattgtttgtgaggtctctttcatctctctcagtgctaataattttcacagtagcagtttacagtggtaacctaagttagcaattgtcctaacttttgcctttccttccttgagtgtaatatttcctgggacctcttaccctcttgttttcttttgatttttgaagagtctaaaattgtgaaactggccaggcatggtggctcacgcctgtaatcccagcaccttaggaggccaaagcgggcggatcatgaggtcaggagttcgagaccagcctgggcaacgtagtgaaaccccatctctactaaaaatacaaaaattagccaggtctggtgacgggtgcctgtaataccagctacttgggaggctgaggcaggagaattacctgataccaggaggcagagtttgcagtgagctgagattgtgtcactgcactacagcctgggtgacagagcaagactctgtctcgaaaaaaaaataaataaataaaataaaataaaattatgaaactatataaccttgggttggtgggtgttgggtacctgagactagatatactcttaagaaggcagatttttttttttttttttgacagaatctcgctctgttgcccaggctggagtacagtggtgcaatctcggtccactgcaacctctacctcctgggtgcaagcgattcttctgcctcagcctcccgagtagctgggactataggcgtgcaccactatgcccggctaatttttatattcttagtaaagatggggtttcaccatattggccaggctggtgttgaattcctgacctcgtgatctgcccgcctcagcctcccaaagtgctgggattacaggtgtgagccactgcgcccggccaagaaggcagattttttttcccacagctcagttaaccattaggaaatgaagaaaataagtaatgtgagttcctaattttgaaaacatgtatgaaaacaagttgataaaacaaaagtctatttggtaagataatgcaaattggttgtgagaaagaaaaagaacaagagtagttttcttgtttagatcataggtcgtatgtcgtgtctgtattttagttttataaggaatgagacttagccatacacattttgattaaaaagccattattagtccatatataagaacaagtttttaagctacataggaaaatcacattactttgtagtgaaattattattctttaatctcaagagatatttcgtatcttaatgatccatttaagtcactgggcttggctttagatgattttcagctgtaatgaaaaattaaattcacctcagaggacaaagatatgttttggtgaaagatgttatgaagagtgtatctgaggctcattctcaaagaggaactcaggaacattttcaaagggcagcattcaaagcggaataagaatatgaccttccacagggacagctttgaagtttagctatacttctttagaaatcagcctcattatataatgagaaagtttctaagggcattttggcaatcctgaatacattagataatcgtaataaggaataatgggtaaagcatccgttcctacaggagtagtatttctttggctatactctgacgagagctgatatttgaagtgattcctattaacattttattgcctcataattttttctaaatccttaattatgataattcatagaaactgagtagatatttcaaattaaatttgtactttaccctgaaaagggcagacacagtctggaaagaagagccctttttcttagcacctttcttcgcgctgctatctgaggtaaaaagaaaacccgtgaataagaatagaataccagaggcttatatgaacatgtattataacattatgtgagaatggatttaatttagattaaggacacagaaagtacctgcttcagcactagcatacgtggaaaagagactggctagagtcttcattgcagacttctggtacagcccaaccacagtatcattcagggggtccttatttttgtccagccagccagtaatgttgtagtccacagtgccagcatagtgaatcagagagaagtgggcctcagccttgcctttgaccaccttgggcttctggaagttggcagacttgcccaggtgctggtcatacagcttgttcttgaaggaggtgtccgttgccttagggaacatgcactcctcttccaggatggagaagatgcccagtggctgaattcagaaaagtaacattggtgtcaacctaacttctctcaaaagatagagacatggtggctgtcatttgattgaattatgagcaccccaattaaatatatgtatgaaataaaccagggtcacagctcgaagaagtcccttgttatcactagaatgacttttccactattcttctcacattcaatctgtagcattactttcaattaaaagaatagctggatacaaacttcctcaacaccgcatgttaaaatgttatgtattattatacttttttcctattcagtgaataaatctattgtcagagtttttcttcgttatgaaaatagcttactgacttatgatgttgactctatgcagtaattaaacagtataaacaaccaaattttattcaagatattttgggtatttaatttctttaaaatagattataggctgagcacagtggctcatgcctgtaatcccaacactttgggaggccaagacaggaggatcacttgaactcaggagttcaagaccagcttggggaccatggcaaaacaccgtctgtacaaagaatacaaaaattagctaagcatagtggcacatgcctgtggtcccagctactcgggaggctgaggtgagaggatcgcttgagccttggggttgaggcttcagtgagctgtgattgcaccactgcacttcagcctgggcgacagagtgaggccctgtctcaataaataaataaataaataaataaaatagattatgaagtagcgtatgcagtttgacttcttgactttgaacagattggctttcatgaaagcactaactgtgtcatgtgtgcattaatttttatatagaaaaatatttttattgtggacatcatggatcataatggagatagatcaagaactaatgaggacagtagttgtagtaaagcagaacatctcaaatagagttttcagtgctgtgttaaagttggatttgatccagtgtcagaataagaatggttagaacagaataaaagtaaacactgtcagatctttcttatgtagaagttaaaaagaggaagtaatttctaaatagtaattttccagtttgttcagatcacaaaccatttgagattacagtaatactttctagaattgcttaagatttctggaaagtgatcctcacagtctgcccttctttggaaaccaaaccgaccttctcaatgagctcaatgcaggcagccaggtccatcccaaagtcaatgaacgtccactcgatgccttccttcttgtactcctcctgctctagcacaaacatgtggtggttgaaaaactgttgcagtttctcgttggtgaagttgatgcacagctgctccaggctgttaaactacacaaaataatagagatttccaacatcaaatgagttttatagtagtaaaattcattactgaaaaaattcttttattgaaaaaatgtggaatgtagtaatgagatacagttaaaactaacgttgctccctcaaaaaatgatcattggccgggcacggtggctcacacctgtaatcccagcactttgggaggccgcggtgggtggatcatgaggtcaagagattgagaccatcctggccaacatggtgaaactctgtctctactgaaaatacaaaaaattatctgggtgtggtggcgtgcacctgtagtcccagctactcggaaggctgaggcaggaaaattgcttgaaccctggaggtggaggttgcagtgagctgagatcgcgccactgcacaccagcctgggtggctgggcgagaccctgtctcagaaaaaaaaaaaaaaaatcattattcacgtgagcctttctcatgaatcccaggcattgttgagggtcccagatatcaatgttagaacaagaattctggtagaatttaccttttctcctctaagattgcatgggcaagaatatactttaaaagttcaaccatggtcctgtgttatggtttcgattcaaaggtaaaagggaaaggagttgattggaaattctcacttctttcaccactcccactctccaattcaaaataaagttcacattttcacctttggctgttacattattaaggaaagctgatcttaagacctttaatataaaggtcttggtgtataaagtgaaatcattagggtaatttctcttctatttatatcagacatttagcaaatccccctcgtcaggtgtgtgaaagcagggacctgatatagtatagcagttgaagatctaaaaggtctttgtaataatttactcctttattttatagatggtgaactgatgccctggaggtaaaatagtttatgtaagacaaatctggaagaggagagacagactatcatctgtctctaggcttctacctttgggccttttcttctctatgaagaagccttgtgtatggatcaaatgctgtagatctgggttgctgtcctggatttgtcttatgcacctgtgggatctttagctagtgttttgatttccctgcatcttagtttcttctatataagttgggggaatattagctactccttgggttgttttgaagattaaatatggtaacgttttgaagtccctagtgtacactgctggcccagtgagcgttagctattattagtagtacattatgttacctcctattttggagataacctttgttctaggtgcagtgttggagcaagtaatatggacgctataaatgtggatgaataatgataatacctaatatatcaaagcccacaattgcctccttcttaattcttgttaatataactcacatcaaagatttcaaagccagcaatgtccaagaccccgatgaagtactgcctgggctgcttggtgtccagctgctggttgatgcgggtgaccatccacaggaacatcttctcgtagacggctttggccagagcacccaccgcattgtacaccttcacagatagagtaatgtttgttggtattgttaaagacatgccatgaaggcctgagatgtgtgtgattcattgaggtcatgcacttacctgctgcacagtctggcctttggtgacatactcattgccaaccttgaccctagggtagcagagggctttgagtaggtctgcagagttcagactctggagataggctgccttgtcagcgactgcagagacacagttcaggacatgttgtttcatgaaggatatcctcttttacctaatctttccatttttctccaattcaatctattatttaaataaaaagcttaaataattctataaaaggccaaatgaggttttctaaccttagagcatgtggttgccagtaaatggttgattggttatactgatctttagtgatttatttcaagtagtttttaagaaatttttcatcaactgtaaacatatgtagtatttattgccgtcttgcagttttttgtaagtaaaagccatagtccctgtttttaagacacattaggtgtagttggaaggataagataaatattcactgttagagagggtaaaagtcagaatattttgattcttatcttagtttttcacctccctattaaaccttgctggattaatttctttatctacaaatgtggagattaaaatttactgcatgatccctacagaatccctttctaaaattctgtcggtgactataacgtaaataaatgccacatgtcaggtacaccagtaactgctgaaacatttagaggaggaagaaagaatgtcaattcgaggtggtcaggaaaggctttaaggagcgataactgtctttctggggtagatcctgtatattgcgtgctctttccatacgtagaatatatgatcttttttctcaattcctttttttaactcttacttgctgcctatattgtctatggatttatatacagacaatacacacttgcttacagatgactctaggggtatctttctccccagccctgtatttgggcagattctctgctgtcagttcctagggtcttcctatctagtgctgaaatagagcagtctacagttatctacatatacccaccttcgttgccaaggccaaccaggagcactattatatctcattctatctcatagtttgtgcttataagtggctattggggtttgtttgtgacttatttgggctggatggaaatgatggagacatggagatgtaaggaagagagggggtgaggaaagcatgcagtgtgtgtaaatgtgtatatgcccttcacaagtcgcaagtccagccacaaaggagatgtgagtgtaaaataggatttttttttttgctacattctctcattaaacccagataaagtttcatttggtaccttctgtgccatctggctcagcttgctcctcacgctgcttttgcttgaatttcatgttcccataatgcatcacagcccctgtgagtttatagatggacactttctcttcaggagtgaagcccaggatgtcaatggcactctaccaggaaaaatgagaggacaaaagttagggctgaagagactaacttataagagaatttatacatatcctaaggtaaccacacctacagtagtttgctattgtcatttccatacataatggatttttaaaattagtgtttttgacttacatcagtggccatcaactcttcttggtcatcaatactgggaactgtgatctccccctgactgacgaaggcatagtcatatgggttggtggtgatcaggagcatttctgggtcacagaattcagggcatacattttacattagacattgttaataaaaatattaacttctatctatgactttaagttctttcttaccaattagatctggcttcttattggaagtgatctgataaaaaatatggtagcttctttccgcctttagctggaaagtaactctggacttttctaaaagatctggagagggaaatagatatcgagtttgaaaaaagtatcaatgcttctgagatagtaaatgaacctcacgtctttggtcaaatttggagcattacatttggctccaatgagatttcaacttgatgaccaattgcagatagacagtgattctcactgtctaagggcagcaactgaagcatacctgctctaggacaaatatatttttcacatgaaggatccatgacctctgtattttagttgatccctaatatcccctccttctttggatcacctaggattcactctgggtggtgagggcctaccttggaaacatctaccaaaactcagatcaggagcaaaccacagagatgtattggaaacccataagtagcccagtttttgtcctggaaaaaaatcatagttgcttctgaggcaggaatttctctaggatgtgttacagaatcatcaagtctgagattgagataaagggagcactcagtggattatgggtaagcctagcattagcttacaggcagtactggcagcagactacccttttaacaggcttcatgcacagcaagggtggcaaaatatccctgcaaatgaaatcacttgtctctctgttttgattttcaatggtcctgttactcacatgtttctatatcagcagatgccagcttccctgtagtaccaaagtggattctaatgaatttacccttgaaaagaatatttagtattagaaaactgaaacacaaagagagatgcaaatgaaataataattcagacgtggctactctggaagttaggggttgagaccaagagactcacaaagcgagaggagttgtcattcctcacagttttggcattgccaaaggcctccagtaggggattggcgctgatgatttgatcttccagagtcccctgcaaaggaaggagcagttctcacatctgggactccagatgtctgagagccttgacagaggttttgactctggctatcagacctacctgcattttgccagattcatccttcttcttctctccagtaactgcaattgttgcaaagtattggatgacacgcttggtgttcacagtctttccggcaccagattctccgctgtcaaacagaaatcagagaagagatcagagaactatggcctgcattgtcaacatctaagacaatccttgcaaatcagagaagaaaaaaaatcacatacgtgatcaggatggactgattctctcgatctgtgaaagaattcaaaatcatccgttaaaaaatgcatatttaatatgaagagtattgaatcagttcagatcaaacacagcttgttctttttaactttttgaagatgtcacctttggttttgattttgtgtttatcctccaaaatagccaattgcttctcagtgtaaaatttgtgaaaatgaaagcaaagaatcatctcttcctttttgtatttattaatttttaattgcgatgagatacacataacataaaatttaccatcttaaccatttttaagtgtagagatcactggcagtaagtacattcataaagttgtaaaatcatcatcacccttcatctccgtaattcttttcaccttgtcaaactgaaactctgtgtcccttaaactcttaactccccatctcctactcctcccattccctggcgcccaccattctactttctgcctctgtgaatttgactactctaggtacctcatgtaagaggaatcatagagtatttgtcttttttgtgactggcttatttcactcagcatggtgtcctcaaggttcattcatattttagcatatgtcagagtttccttccttttaaaggcaggatatcttattgcatgtatataccacattttgcttatccattcatctgttgatggacacttgggttgcttccatgtttttgctattgtaaataatgctgctattaacatagttgtacaaatgtctcttccagaccctgcttccagttcttttggggatatactcagaagtagaattgtgggatcatactgtaattctatttctaatttgttgaggaactaccatactgtttccacagtggctgatcattttacatgatcactaacagtgtacaagagttctaatttctccagttcttgtcaaaacttgttattttctgattttttgatagtaaacatcctaacgagtgtaaggtacatatttgattaatttttaaaacatttattatggaaaattcaaacatatacagaagtagagacaataatataatgaatccccatgtgcccatcatacagatgcaatggttattaatatttggccaattttatatcatctatacctcatcccaatctcactgaattattttaaagaaaatcccagaatcttataattgtatttataaatacttcaattagaattacagaattttgaaggcataaaagatcttagaaattgcttaggccaactcttacatttaagggataaagaaactgagacctgtaaaggaggaagtgacttttctaatattaagtacatagctagttaaggtcaaatatatcctcctggcctcttcccagcttttgatgtcactagtttgacttctggcaatactaaataaggaaggggtctggaattgtgaatatttgtgttcatctgttttattttccttttaatcttatatgcatttctaaataataaaaacaaatgtcactaattatgtgactgatatgttgtatttacatcaatttgctgatttgttaaatctctaattctatagtgttagattatagattttagagaattctaaaacctaaaaatctattcagggaaaatagatataaatctggatgttatttagatgtagatatagacatagactttagaaaactttagccttctcttcagggaagtcgatgcagattttgcatcctattcagatagatttgttttctagtataagtaaaaccgtggaagattatatcacatctagtggaagcacagatgagaaaacaatgttctggtctcttggcaatgctaaaataacactcaccagctcaaaggctagagctctgtaccattttgtacaaaaatcatgtttgggagccataagtaaccttgaatttggagcagccccaaaccctggggagcggggggcttgctgagtgggaggacaggggtggtgtacatagctgtgtaaatgcagctgttgagtattaaaacctctgaaatgagccagcgtttggataatttctgggaggtagttagcttctgttgacaatcaaagaacagtttactggcatagaatccttgtagaattgatggccaatttgtaatgggagattcctattttattccttcctctttattctccccctcgaaaagacaatttaaaaacaagtgcaaaaaaacaaaccaaaaagaaagaaaaaacaccttagtttccaaaattccatggaacaacaggaaactcaggaatagaaagtatttccaaaggcagtgcatttggtgtgtgaagataaaaggttttaatgctgtatttgggcctataatgcgtatcaaagctggttgtttatgccttgataaggcaggagtaacagactttgatacaatttaaacatttttctcagaaaagattttttcctttcattgtaataggaaagtgcttcaaatctttgggaggaaaatcatagctttctttactcatgttttacccttaaaggctggcaatattagctgtgtcattcaaaaataaacataagaattcacaaagttttccagctgtggctgataactcttttcgttgactgctgtgagcctgggtatttttaaaaagtctgtttgaacacttttttctatccaaattggaaagtaacaaaatatggaaaacaataaatatgtttacagtggtctagtaattgtttcagctaggcttccacttaactatctgtgttagcttgggaaggacagtgaattcagtgagcttcactttactcatctgtaaaatggaggtagctgctgggaagagcataagatgtcacagctgtgaaagttttttgaaaacagtgaagccccatgtggctagaatgtattatcataacataaagaggctcggaagaggtctgtctgttctgcaaagattctatttacacatttctgtaaatagatgcctcactcactcaccagtcaacatgaactgataggcattgtcagagatggagaagatgtggggcggggcctcctggcgctttttgcctctgtaggcagccaccacctcgggcttgtacaccggcagccacttgtaggggttgacggtgacacagaagaggcctgagtaggtctgggaagatcagaacatttatcatttggatctcgtttttactcagagagagacatgaaataaaaaggtgtttacagacactcacgtagatcatccaggctgcatagcgctctttgaggttgtacagcactccaggctcgtgtagatgagtcatcatggccatgtcctcaattttgtcatatttcggagggttcatagggaagacttggtcttccctgacagttagagtctggtgagtaagcaagaaaccagttcgtttttgtttgtttgtttgagatagagttttgctttttttgcccaggctggagtgcagtggcgcgatctcagctcactgcaacctccgccctcctgcttcaagtgattgtcctgcctcagccttctgagtagctgggattgcaagtgcccatcaccatgcccagctaatttttgtatttttagtagagacaggatttcgccatg[136 bp omitted]tttgcctgtatattttggtacaaaactataatcacacatacttctcattatattatttaatgtcctcttaaaaaaggcatgaaatatattcatttcagagtttaatgttaagaaaacctgtttcctatgatgagctaggacactatctttttaaaagattttttcctcccacattctcttatcccagatttatcagtttatatcctttttttcttattttagtaggctaaatttttatttttttctttcattcattaagaaacttcatgtttttggaagtaatggggatattaatacattatttaactaagtaaatatttaacttctgataggaggagcttgttttcatttccctcaagtttggacattcagactaggaagtggggaattgaagggaaatggtgaaggccatacatagtggggtgaggtcctgtgcgaagttgggaagggaagacatgaaggtactgctgtgaatttcttttgccttccacatctaatgtctcaacactgactagaagggtgtttgcattggcaacaggcttggagattcccagtaagttaggcttcaacttttgaaccaagaaataaaatggggagtattttctccctgttttcacttactgctccaccttcagtctttacggttactttccctccttctttgctttgtatagtgctcttcacataggattccttgggctccgccacaaagacagatgttttagcatcaaacggcttgttttgggcctcaatccgctccttttctgattttcgaaggtagggagcagcttcgccaaaaacagccatctcagcgtctgagctcgcactcatggctgcgatttatttagcaaaggattctgcctagggaggagagaaacgggagagagagatataaaaagcagaagtcacaaatgtgagttaggatttgaaatgaaagaaatgttgaacatagcctgtgctgtaactattcctccaaactggcactccccagtgttctaacatagtctaaaggacaagtatggagtgagactgtaatttgagatttcatttttaggactgtgaatttccttttcagatcacatatcttgatcctcagggatagggtacctacaattgaattagaatgaaacctctacagctaaaactattgatggattgttttatagcaactgtcattatttaatttcctctcctctttctgcataatgtttgtctatgccatatgccaggacaatcatatggtgagaaaagaaagtttgtcttgttcaaatgaaggttcatattttcaaagctatcaaaaaatctttgccttttaagatggccattttctctcataaagcaaataattatttttaacatctttatgttgatatttggtgttgtatctctcagtggattgttagaagaacataatacattctaatactctggattttttgtaatttgggttgttcccaacagacttagcattgccttgattccaaaatcttttttgacatgagagatttcagctgtcagttaacagatctaaccacagaggaatgagagcttcagcacaaaggcccttcttcccacataaattccatgggtttcttttctttccacccagaaaacagagaaaaaagttttaagagtacatcacatgcatgtaagccattgtcttctgattaatagataggcctctgcaatgtggacatgttagattggttgagtttttcctttattttcaattagaaagttacttagggaagggcaggattcctcttaaattagtcatggtatttaacacccggtggatgtaatacttgcgacctgttaagtaaataataataagtctttctaacaacaaataacaaataatcaaaggtagctaaaatatttatatttatatttctaggtaaaaatctttctggagtctttaaaaatgtctataaaatgtcctaagtcctcaatgctttgccatagaagaagactggcatggactagtctattgccactggacagttctaagcacagctgagaactcactgttgaagctaattctgtcctaaacggtctttgaatcttggaacccaaatgaggatagtctctgagaagaagacattttgaaaaagttattttctagcatttataaacactcactcggaaacactctttcctgatataactgcaaaaacatggaaatggtgtataattcaggattgttcacagcttcattagactatatcccctctgtcatcaataaattaataaagccaagtcttacctctggagttccagataaaaatgcaggttcagaagtgttccactctgtaaaacaacaagcttcttattagtgatgctccgaaattccaatattatagttacagaattgttattatagttacagaattgaagtttccctaccccaaagcttggttctatgaagacaaaagttaagattgagagagcagtttaatgctcacagataactacgaggtcagctcttttccccacctggggtttttcgagttccaaggccttcatcacttacctctgggttcttggtggaaataaggcacaaggggcagtcctgcttatataggaactaatgtgctgatgctgcaactacctcctctttgttagggcaagacatttggcaacatgaaccctcagcatagtttgtagtgacatttgtcatgtttggatataattagaagtattcatatcattttgtgtatgcaaaccaatctcctataaataatttgacagagaccgatctgccagcagagaatgctttctagtgtgctgggaagggaatctttgacagtgcctgatggggcctcagagtaagttcttaagagctatattcaatttggcaaactctttcatgcacgcctgtggtagccaaatgatcagatacccggggcacacggctgtcagggccttaagcacgtttccttatttgctaccacgggaaccccccactgcattcccttgggccactacagatgctcactcttgaagtccaggcttagacagcagagattctaccttgagtctccaccattgggccagtgcccactcatctaactttgaaaaacattattagtagaaaataatatgtttattacagaaaaaaatacaggtaagtaaaaaaagtctctgtaatctctaatgcagaaataagatagaggcgtataagtgggatcatattatagatgcatatatagtacatgtgtgccttgtaatatgctttaataattaatatatcatatcactaatgtaatttataccctattctttaaataaattatgattttttttaattaaactctttcctttttttaaggtcagatatattgaggtataatttacatagagtcaaattcacccttttaaagtgacagttttatgaggttttttgcttttatttttaaaaatttttaaactttataataaaatttacttcttttgttgtatgattgtatgagtttttatacacgtattgattcatgtagccaccaccacagataggatgcagaacaattccaggcctatgggtttgataaatatatgcaggtgtgtaacctcttacactgtaattacataaaaattaaagccttagagattaggctaaattttccctttgatgaacactcacaatgctggtatctcccttttctcccaaggtaactacggatacccgtttagtttgtaatattgcagaccttttctgtacatttacatatgtattttctgggaaaatataaattagtaaaactggtctaaggaaattgggccatagaaaatttataatatataatatagatgtttaaaatatagatagtatgattatttatttacaaactttcttttttcattctacactcttggatcatttgccatgttagtacataaataataatatgaaaacatttcaaacatatgcaaaagtagaggggatagcataatgaacctagtatattcatcatccagcactgataattatcagttcatggtcagtcttgtttcttatatattctcaccattccctctatcactggattattttgatattactcatttttaaatttctgtgtaaaattccgtaggtttaagattgtaataattttgtttatacaagttctaaaaagtttctcctgatttaataatgatctttactatgcgatctcaatcttctagaagttttacatctttaggtagtcagagttataaaaaattttcttttatatttttggttttttgtgtgtattgtataagaaaaactttctctaactcaagaactcagagtcatacatatattcttctgtattttcaagctaatgcttatgaaatagtgagatgtgtaatcctgtattttcaatctgatgcttaaaaaatagtgagatttgtaatccagctgtgtgtgtgttcgtgtgcatgtaatctgtttctggattccatattttgtaccgtatttctatgccaatagcataggttttgatgaccagtagggccaattttccctaattattcaaagttgtcctgttaatttttaccttctactatatgagttttagaatcatgttcttcaggttatggaaaattctattgggattttgattttgattaaattgatttaatagattaatttgataagagttgatagctttataaaagtgagtctttcagtttataaggatgatatattttcctgtttattccaagtccttttcaaaaatactttttagtcatttttaaaagttttttccataatgatcttatattccttgttcggtgtattcctacaaattttagagttttctgttgatatgttgaataggattattttttctattacactttctacttggttactactggcacgtggcagacaagtttgcataatcagagcttcacttttgtttgtggcagtagtatgccaaactatatattattatattcagactctcagcatagggtaaccatatgacactgttttggctaatgaaatgcaagcagaagttgctgggtggagcttccagaaaagctcttttctaaaagagggtagactttgctcatactacctttttctttcctatctctatctttctcctacgtagaacacagatgtaatggctagaactatagccttaaaagaaaggtcaagagatttttggagaccttagccttgacacctgtgagctgaatttcattgtgtgaagaaaaaagtaaagcactaattttttgaggcattgtttactcaggttttttttgttacattcaaacacaatccctaacatacacggcgtttcagaaagttactgacttttctgtgttaaccgttatctggccctcttgccgaactctcttaccacctctaataatttatttgatgctcttggattttcaatgtgtcatgcgcaaataatcacaatttgtgtcttctttctcttgtcatttatatgttatttttttcccttctcttattacattgtctatgacatttaggacagtgttgaatagtattaatatagtattaatacagagatacttgtgtacatatcctgtgcaagataagggcatccttatcttgttcttgacttttattggattgcatctgatgtttcaccaaacataatatttactgtatactttgtatctagtttgctaatcattttgatcataaaaatgagttaaatagttctatttctaggtatatgcccgagagaattgaaaacatgtttatataaaaacttgtacataaagtttatagcaacattatctataatagccaaaaagtgggaacaatcagatgtccatcgggcaacaggtagataagcaaaatcctgtttatcctataatggactctattaatgcaatgaaatattattcagccataaaaaggagtgaagttagatgctactatatgggtgaacctaaaaatattatgttaagtgaaagaagcctgacacaaagggcccatatttgatgattctgtagatctaaaatgcccagaataggcaaatccatagagaaagaaaatacattagtgattgccagaggatgtggagagaagagaattggggagtgactgaaaatggacatggagtttctttttggggtgatgaaaacattctggaattaatagtgatggttgcataactttgtgaatctaataaaaaccactgaattatacactttaaattgtgaattttatggtatgtaaattatgtctacaaataatgggttgaattttaccaaattttttatatctgttgagattactgtttttctcccctgacctatcaatggagtgaattatatggtaggtttttctcacctttaccaccctagaattcatgaaataaaagctattgatataatattgtttaattctctgctgctttcagttttcgaattttttattggaattttaaaatctgagttcatatatgactaggtcaaagttttcttgtgctatcattttcttgttttgatattaggatcatattagtcttgtaaaataaactgagcagcttcccatttgtttgtgttttctataacattgcgtttgagatgtgaattatctgttccatgatggtttgatagagttcctccatggaattcttttgacctctagcctttgtggaatataatttttttactcttattgagttttttttatgattattgattagtctttgtagagtttctacttgtcttttggcccatttggatgatttatattttcctataaaattacttattttgtgtgagtttttatatttttgggtcttttttgtgcatatctctataataaaaaatctcagtttagtaatctgtttcattatttatattaattttgttcttctttttattttaaatcatatttgccaaagttttatctttttcatttagttttactgatagcttttattttctagcttattattttcttttagttttatcaattgctttatttccttagatttgttttgattaattataattagtttaaaattttgattcttgtttcaactcccaaattatttaaagcattttgttttttaaacttccaggtgtatgaatttgggtgttgggcaggcggatttcatctagccgttaattatttttatcttttgtgagtgtgtgtggttgtggtgtgttcatatcctagtacgcccaatgggaatgaggattatggttcctgtgattgtgtttgtgtgtgtggatgtaagtcataaaacaattcaaatagtatccaataccccacgaaactctcatgatcttctgtattataactcatattttccttccttaaaaggttactatgaatttatttttatgataattatttctctgcatttcttaatgttttaaaatttgtatatgcatccctagtttagttttgctggttttgaacttcatgtgaatacaactgaatttattttttagtatcttacttcttttgcccaaaattattgttgtgagatttttccatgaagttgcatgtaactgtgttttatattcattgtgtacagtattaccttgtctgataatatgattatttattcattctactgcagacaaatttttgggttgttcccagtttttggctgtagtttattgattgattgattgcatgatgaacagtgactgtcacctgtatgatatctcattttagaattagttgacatttcttttgtggctttgttcatagatcagggtattttttttaaacatctttatttaggtagaattttacataccttaaatgtcatccattttaattatacagttaatgaattttagtaaacttataaaattgtgcagtcatcaccacaatctagttttagaatacttttatcaatccaaaaagtttccttttgctcatttgctgttaattcccattcaaccccaaaccttggggaaccactgatgtgctttttgtctctacaattttgccttcttaagaaatcgtatagaaatggaatcctacaataggcaatttttcgtgtctggcttctttcccttagcattttcatttcaactcccaaattattttattttttaaacttccaggtgtagaaagttggttgctggggaggcagattttatctagctattaactttttatcttttgtgagtgtgtttggttgttgtgtgttcgtatcctagaaggaaattcaattttttgaatttcatctatatgctgttttatgtgtcagtaattcatttctttttatgaatgtatatgtggtagtccattgtctagaggtaccacattttgtttatccattaaccagttgatggacatttgaattcttcctagcttttggcttttataaataatgctgttattaacattccacataagttgttgttcagacatttgtttttattggtttgttttccaggaatggatgttggatattataagaaatggccagactgggaaatagcagacaaaagatattgcatctattctggttggagaattgcagtagtggagttctaagtaaaagaaagcaagtttccaggaataaaaagcttttaccacccaatgaattaacaggccatcctacttgacatcaaaacacatctttaaaatatgggattaaaacaatatataattaatgtagataagtataagagtagaacataatatagtccagaaatggactcttgtatgtatagcaagttagtataagataaaggtgcatttctgattcactagaggaagggaagaacaattcagtgaattaaaattgagacttaacaatttgaaaaaaaattaaattacttccttggctgacaccatttataaaaataagttctagatgaattaacatcttaggcataaaaacaaagaagtattgaagaaattataggagaatatattgatactgtcggagtagggggagatctttaataaggcaaaaagatcagacatttgaccacatcaaaatgtaaaacttctcaatgattaaaaaaatctacacaaacaaattgaaagacaagtggcaggcttggacaaactattagcaacttaaataaagaagttatattcaacacacacacacacacacacacacacacacacacacacacacacacacacacatctctttcaaatagaaaagaaagggagatacaagcaagtaggaaaaaatagccaaaagatagaaatagataattcatggaagaggcaatacatatggctaataaacatgaaaacatgctcaatctcaagaggtacaaaataaaataacaaagagctagtgtattttacccatcaagttggcaaaaaaaaaataataatggtagcaaatggtggtgcagagaggtgaatgtaatatgttgtgagtaaaggtgtaaatttccagggcaatttgttatatcttttgaaatttaaaattgcagtgatttcacttctcactttctttcctgcagaagcacactgaaataggaaggatgctcaagagtgtacatttaacatttcttctaatagcaaaattttggaaacaactgtcaattcagttacttgtaagttaattaagtggccacctgttaagtggtggtgctccgatgatgtggtcagtggttgaaacttgaaactcgccttaatctaagatttggatcagcataatgcattttccactggttctctttgagatatactgaaaactgaaaatcttatttaaaataacaataaacaatgaagtaaagagtttttataggtaacatatataagaatactaaactgggagatatattttgctaaagcctaattattggtatatttcaacccttctgtaatgtacagatatctcttctaccattcttgtgtgacaactcatttattttaacttagagtaaaggcccttccaagggtctggcttacatcccttgtccttgctcttcttcgctagtatccacttacaattaagccgagggtgaacattaagttaccgtatccaatgacccttctgctctaagagtccttgccagaaattagcttacaattcctaagatttcctctgccctaagagttcctctattttctctctgcagtgagtaaaagcagatgaattacagccactttaagacatctctaccttttctaaaactctgtaattatattctcttcaaccaaaggaaacaactgacctttcatatgactcatgccaaagaggaatgttatttagattcatccacattcttgcatgtatcagtagttcatttctttttattggggagtagtactccgttgtgaggatgtaccatattttattcatctgttctcttgctggtatatattttttatctttttatagacatatctttcatttctttcagttaaataacaaggagtggaattgttggatcaagaggtaggtgtctagtaactgtactgttttacatcctcgctagtgatatatgagcaatgtggttgctcagtgtcattagtctttataaatttagccattcttgttggtttgtagtggaatctctttgtggttttaaaatgtatgtccctagacaatgatattgagcaacttttagttttgttattaagctttcatatattctcttgatgaaatgtctgtgttttgcccatttttgttggattatttttaaagaatattgttttgtttgtgttctttataagtcattttttcagtatatgtattgcatatattttttttagtaggtggcttgcctttttgtgttcttaacagtactttgatgagcagtagctttaactttgaagaggaccagttttatcattttttctttcatatttagtgcttgctgtgttctgtttaagaaattttgcacgagattacaaagatactctcctatattttcttctaggagatgtataattttagtatttacatttaaatctgttgtctaccttgaattaattgttgtgtatgcgttattatttttttccatacagatgtctaattgatccatcatcatttgttgcagagacttttctttccacattgaattgcattagcaacttagtaaaaagtccactatatacatattggatctatttccagactctccattctactctattctgttccattcaagtattcttctacccttacactaataccacactatcttaattactgtagctttgtaataaattttaaagtctgtagagtaagttctccaattttatactacttactttttaagacttctttggctactgtaggtactttatatacttatatgcattttaatatcaaactgccaacttctaccaaaaaaaaaagcttgataggattttgattagggttacactaaaactatagatcaatttgtggaaaactgacagatttacaatattgagacttcagtccaagaacatggtgtctctctctctcctctctcttttagtcccattttttgacagaaagtgttcactgttttattattaagcaagatatcttagctgtgctttatttgtaggtgcctcttactagattgagaaagttttcttttattgcttgtttgctgagaggtttttttttcatggatgggtgttggatattgtcaaatgctttacttcatctgttgagatagttatatgattttcttttttattctgtgaatgttatgaattacctgatttttgaatattaaacctaccttgcattcctgtgataaattccatttggtcatgatttattattattattgttgttgttaatattgttttcatatatagtaggcactgcataatgacattttggttgacagcggactgcatgtattatggtggtcccataagattataatactgtatttttcctgtaccttttctatatttagatatgtttagatacacaaataccattctgctacagttacctacagtattctgtacggcaacatactgtccaggtttgtagtctaggagcagtaggctataccacatagcccaggtgtgtagtaggctatactgtctaggtttgtgtaagtacactctgtgatatttgtacaatgaggaaattgtctaatgatgcatatttcagaacatatccccattggtaagcaacacacgattgtattgttagacgttgttggatttgacttgccaaaattttgttaaggatttttgcatctattagggatattggactataattttctatattgtttttctattctcgatttcattaatttctcctctagcctctattatgtcctttcttctacttgctttagatttcatttgtttttcccacctgctgtgccttaggtggaaaattaggttattatttgagctctttcttctctctttatatagacatttacaactgtaaagttctgtctaagcactgctttagctgcatcccatatgtttttgtatattgtatattgtatcttcatgttcattcatctcagagtactttctggtttccctttcgattttttctttgacacatgattatttaggagtgtgttgtttaatttccacaaatctgtgattgtctcaatttttttcctagtattgatttctaatttcattccattgtggtcagagaacatactttgtatcatgcctatccttctaagtttactgaagtttgttttatagcctagcatgtggtctgtcctggagaatgttacatttgaacttgagaaggatgtatattctgttgttactgggtggtgtgttctatagatatctgttaggtctatttggtttatagtgtttttcaagtcttcctttttttcttattgatcttcattaattgttacatccattattgaaagtgggttattgacatcttcaatcattattgtggaattgtcagtttctccctttatttctgtcagtttttgattcatatgttttggtgcctctgctattaggcgcaaatatatgtataagtattatgtcttcctgatgggcttatccttttattattttttcattataaaatgtttctccttatctctggtaacttttttttaagtctgttttgtctcctatcagtatagccattccattttattatggttcctgtttgcaagataatgtattttttcatctttttacttatatttgtggcttctgtagacagcacatagtttgaccatatatttttatacattatgacaatctctggcttttgattggactgcttaattcacattcacattgattcacatttagtgctgttattggtatagttgtaattatttcttgtatgtcccatgccttttttgttccacttttctttcttactgcttccttttgcattgaaaattttctaatgtagcattttaactttttagtaattctttcactatatttttattttattttgaaatttttctatagagatgggttctcactttatttcctatgctggtcttgaactcctggcttccagcaaccctcccgcattggccttctaacatgctgggattacaggcatgagccaccatgcccactcctttcactgtatttttttaatagataccctagagtttaccatatactgtaaaccttaacttatcagaaccagtttcagattcatactagttttattctagcgacatatagaaaagttacttctacatagctctactccatttttccccatttttgtcatattactgttacctgtagcttttaatgttacaaacccagcagtacattgttaaagttattattttactatttatagtcatttccttagcccaatacagctttgttcccacacaactcctttatgctgtattggcaagtatgttacacatatattacatttctttatgttacaggcccaaccatacaatgtatatgtattattttatacaattgctttttaagtcagttaagagaagaaaggagaaaaaaatatgcatttatactgtcttgtaattacatacttacattttctggtactcctttttttgtgtggatatgaattcctgtctggagttacttgccatcagcttgaagaatttcctttagtatttcttatcaagcaggtttgctatcagcaaatactctcagtttttatctgggaaactgtttatttcaccttcacttttgaaagatagatttgctggatataagattttttggttgatgtgtgtgtgtgtgtgtgtgtgtgtgtgtgtgtgtgtgtgtgtgtgtctttgaccactttgaatatgttatttctcctggcctctattattttggctgagaagtcagctgttaatcatactgttctcttacaagtaatgagtcatttttctctcactgctttcaagattttctccctgtctttaattttcagcatttttactatgatgtatctatagatctatttgcatgtatcctagttggtgttcatcgagttatctggatgtatagataattgtttttcaataaattcagggagttttcatccgttatacatttgaatattttttctgctcctttctctttgtcctctccttctggtattctcactgtgtatatatcggtgtacttcattgtgtcctacatttctttgaggctctttcattttttattattcttttttccctcactgttctttggctttcataagctttatcaatctctcttcaaattcacttattctttcttctgccagttcaaatttcctgttgagctcctctagtgaattttaaaatttcatttattatactttcaactcgacaattctgttttttttaaagtaatttctacgtttttattgatagacattatttgatctgacattgtcattatgccttcctttacatctttcatcatattctctttatttttgtgaaaatgtttatgataactagtttgatatctttttctgttaaattcaacattgattgctgtcacaagcagtttctgttgcctgcttttttcagcgtatggattatgctctcttatttctttgcaggtatcataattttttgttggaaactggacattttagataatgtattatagcaaccttgggtagtgttgccctctccagggatcgtcagttttattttcttacttatttgttattaaacaatttctttattacctttattatttttaaaaattttatttttaaaattagtgcataatatttttacatatttatggagtacatgtgatattttgatacacgaatacactgtgtgatgatccagtcaaggtatttgggatatccatcacctcaaatatttatcatttctttgcattaggaacatttccatttttttattctagctattttgaaatatacagtatactgttgttaattagagtcagcctcctttgttatcaaacactggaacttattcttgtcagcacaagaatatttgtttttaactggctggtttattttagtgaagtttgtttcccacccacagtttaaagcttctgatattgctcctcagggaggtgcagctttggtatgcccacagccaccctgtgatgacagtggttttgagagggctctcttcctctctttctctgaccacacccagatgtcaaactccactacttggtggccgatagctttattgattttaataattcctttgggcataaattgttctatgaactaatccaatcaaattctgcctcctttgaaaacataatttctgaggtcagtgtttaatatttgttttgatcccagggggacttctcccagctatcttattacctggttctctcctaaaaactagctggcatacagtttagcctatatctttaattgcatggcaatttgtttttaccacaatgtgccctgttgttgaaagtgcacttgggttttaatttctctgccttctgttgcaaatgaaatcagttcctttgggcaaagattaggagctctgttttatgactcacttctcccctcaggcaaaatccgagccagggctttggagctggtggtggagacaattttaatcttctgattgacacctccattctgggaactgagcacttggtggggatgagcagcagcctaaggcccgcttggcttgtctctcctggtgtggaacctccacctcataagtcaggtcaagggtgatcagggccccaatattctcagcacccggggtagagcttctgttccctgagtggtagctgggcagaaaagagagcctaagcctttcaatcacatttgctcgggtcttagcctcagaaacgggtagctggaggtagatgaaaaatattaatgtcttgtgctttttagaaagaaagccctctgactgggagctcgagggaaaggaaatcctgtggttggctgtagcaatctggagtggagtcccacctctctgtgctgggatggtaagaggcaggaagtgattttggttcaataccacagaacctttcctttcttactgaatttgcatggattttcttgatagatgttttttccttttctgtttctttagaaccatttacagagactttaaatgttgttttgtttaagataattttcacctatttcactgggaagaggatcggtggagctcctcatgctgtcatgctggaagtcaatcctccttatagcacgtgtgtgtatgtgtgtgtgtgtttctttgtatgtcatttttagtagtttgctttaggtattacattatgtgtgtctcatcactgtcttctgttgtcatgttatcagttcaagtgaaacatagaaattttacctccctggaagtccttttaccctcccagtttgtaattgtcttaaatatttcctctgtatacttttagaaccacaccagaaggtgatataatttttgtttcaatcatcagacataatttaggaaactcaagaacaaaaaaccttttatacctacttttatttttgcttatatatttttttcctctttgatgttctagggtttctttattcacttttttcctttctgcttagagactttcctttagccattcttttagggtaggtctgctggtgacaattctcatagtcttgatctaagacttaggtttaagacttaaaatagtcttaatctaagaatgtcttgatctccctttcattcctggagcttattttttctggacataagattctgggttgactttttttttcagctactgaaaaatattgtaccatttatttctgtccttcatgatttctgatgagaaatcccctgtcatctaaactgtttttctcctataggcaagatgtcatttttctctggctgcttctaagattttgctttacttttagtatttagaagttaatgatatgcctgggtgtcgatttctttgagtttatcttgtgtagataaactccttcttgaatctgtaggtttatgtttcctagcaaatttgtaagttttcagccattatttctttaagtacttttcagccccaccctcttcttctagcactttaatgagtgttagatcatttgttttaaggttctgtctactatttttttcatctactgctttcagttgttcaggttggattatttcgattattcttattccaactcactgatttctctgtcctcttctttttcctgttgagcccacccactgagctttttaattcagttattgtatttttctgttctaaaatttccacttttttaaacgtcttctttttatttgctgaggctttctgtttttccatttgtttcaagcatgttcatagttgctctttgaagcacttttgttatgtctgttttaaaatctttgtcagataatttaacatctctatcatcttggttttggcttttttaactcatttatcttcttttcattcagtgtgagattttcttggcataatgagtgattttcagttgaaacttgggcatttttgtactgttcttggaatctggatcttatttaaaccctttaattggctttctattacacttctctaataagggaagtgatatggtttgctgtgtccccactcaaatctcactttgaattgtaataatccccacatgtcaaggtcagggccaggtggagataattgaatcatggggttggtttcccccatactgttcttgtggtagtgaataagtctcatgagatctgatggtttttataaatgggagttgctctgcacaaactgtcttgcctgctgccatgtaagacatgactttgctcctcatttgccttctgccatgattgtgaggcctccccagccacgtggaactgtgagtcagttaaacctctttcctttatgaattatccagtcttgggtatgcctttatcagcaatgtgagaacagactaatacaggaagcagggctggtgatgctaccttactgcttccagatagagttgaaagtccagtttcccttctgttagcacttgaatggggagtatcttttcattactgttgcatgggggtaagctcattactactgagcaacagtgaaagtgctgactttcctctaggcctcctctgatggtgggaaggacaaggggtgccttgttactcccagtgcatgggagtcaaagatcccaatgttgtcactactgatatagagtaggagggcattactgaccagcagggatgaaaatcccattttcctgcttggttggcatcatcatcctctagtgcaggtgttgggcatcttattatagcctcctaaaggcagaagtataggctttccactcatcttttgctgggggtggggaggggtcacagtcttattctcttttctttgattccactagagaagctattgtctaaaaagctattgtctaagttttctgtcttgctaggctgcctgtttctttgtcctctggctaaagagaaaggcctttgttgggctttaaaaatcttcatccacttgggtttctctattgtctgcttcttcagttccaagtctggggcatataagtcaaaaagaaaactcagggaatttatgtcattctttgggtcctaaggtcctgtattagttcatcctcatgctgctaataaagacatatcagagactgggtaatttataaaggaaagaggtttaattgactcacagttctgcaggattagggcttgcaccctctgaagcaacatccttagctgtactttggctccttttagccatggctggagtgactggcgcactgggcactaagttccaaggctgcacacagcagggccctggacccagtccaggaaaccatttttccctcaggaaacttacaattgtggcagaaggggaagcaaacatgtccttcttcacatggtgacagcagggataagtgctaagcaaaaggaggaaaacccctcagaaaaccatcagatctcatgagaacccactcactatcacaagaacagcagcatgggagtaaccacccccatgattcaattacctctctcccatggcacgtggggattatgggaactacaattcaatatgagatttgggtggggacacagccaaaccatatcaggtccctggcttttccatcttttctccatcttccagaatctcttatgtaagttttatgtataatgcccagggtttttttgttgtacttaatgagaggaatagggaaaagtacaaatactctatcttcctagaagtggaagattccttgtagattttttttgtagttccatcaattactgaggaaaaggtgttaaaatatacactgctttaggatttacttatggatcgtatgtgtaagatacctagcactgtgcatggcacaggttaagttcttattattcattcacccaacagatatttcttgagcaaccattacatgtcaggcaatgttcatcagatattcaacagtgagcataacaaagtccctgcccttatggaacttatattttagcagaaggagacagatattaaacaaataaattactagttaagtggtgccatggacagatatgaaacaaatcaaggagataagaagcataactggcagggtagggagaaatggttgtttttttatactgggtggccagggaaggtctctctaataaggtgtaatttgaccagaatcctaaagacattaaggagcaagccacatggatatctgggtgaagagcctctgctttggtgaaatgacagattactgaccttatttgtaagggaagaatgtcatcagaaccttttgcttgtcagggtatggtggaactcagaacagtgtattgtttccagaaggaagaattagatgatcatgccctaggtctggctttcgcatctattagtcatacaacttttgacaaagcacaatcttctttgtacctcattttccaaaggattctgttatctcacatggttgtgagaattcagtgactgacaaattgcacatgaaaaagcattttacaaatgaagcaaagggttctatagatataagatattatgattgcatcattattactgccagtgctatctaacttggaatcaaaaacatttagattagattttagagattatttttagctcaacctcctaatttcatggctaaagaaacaagcccagaggagctgcagcctaatttatagatgtaaatgtggggctatagaatacagcatctgatttctttgtgaaaaaaaatggtaatataaagctgtggttttcagaatgtggtccctgcatcagcatgacgtagggaattgttagaaatacatacacattctttggctccagtctatacctactgagtcagaaattctggagatggggcccagcagtctgtgttttaacaagccctccagatgattctggtgcttgctaaatttaagaaccattgattaatagggaggttcacaaaccccttcactcataaagaatgacactggagaatttaatgcccagggtgagccttcagcaaaattgtgattaaatggcctttgtaggggcatttaaaaatcttccctcttttcctgcttcagggttaccttttcttcaggcacatctcaaggaacctctttccttagatgctttcttagttgtttggccaataactctagtcagggtgttagttgaaattactacatcttcagattaataagagagtaaataaaatgaccatcctttagggtcccaagaattcagattctaatagatttggatataagacacatagaagaggtaatgctctggagtagaaggatcctgagatttctcctattcttaacacctgtttggttatttgaacacttatgaatggagtggaaagaagatttatgatatttccagtatcagtcacagaatttgcttctagtaaccatggtttttaagttctcagaacatagagaaaaaaagggattggccttattacagattcttttttttttttttttttttttttttttgagacgatgtcttactctgttgcccaggctggagtgcagtggcgcgatctcggctcacagcaagctccacctcccgggttcacgccattctcctgccttagcctccgggagtagctgggactacaggcgcctgccaccacgcccggctaattttt[137 bp omitted]aggttttattagcgtcatgatgcttgacttaccaaaaacactagggtgtggtcatctttgcctagttctctgtgtgtacactttaaatagttttatctgtaagttagagaagaagtcccttgcttttttttaacatttcaaagtctttttccagtctcgttttctttctgtcacactaagtgttagtgttacaatcaggtaggaattgaacttaaactacctctatttgtcctaattcagacttgtgtgttcttggagacagcctctgccttctccttgcatgcatcctgtttaggttctcagatccagcagcactagattagaaacagtcaccaaatctcactaatacctcgtatcaattaaaggaaagttgaagagtgctataagctgtcctagattattatgtgtggctttattttagtagataaggaaatacgtctataaatcagctagtctgtgaggaagatgaggaagaatattgaccagaataactgtgactctatatgcttgctcctttaatcaggaaacccgtaataattgacccatatgtaatagaatacactcttgactctctacataagcaattatttaagttaggagtcagaataataaagcaattgcccagtgcttttgaggtcagtagattaactctacagagcttaattaaaaagcgataataaatgcttgctctagggaggatatttcattagtcttcatcatggcctgggtgaagtattcctgataattattttctagccctttaaaattctcctcttacgaagcaaacttctcactactagttaggattcccacattggggaaggagatttcccaaagcagctcctccattagaaaagactaagtttgaaaagacagcaccactataaagaataaattggtattctcttatttttggaagaagcaaaattttaaactaagaaaatatcaaagaaaagaacactatggcaatggctatgataaaattttggaaatactgtttttgaaattaagaattagatttcctttatggttcctccttaaaatatgcaagatactgagaaaagtcaggctccttttctggagcaaaaatggacagaactttttggataaatctttctgttgaccttctaattctacataccgttagatttttggataaatctttctgttgaccttacagtaaacagaacttcatcttcatcatggcctaggtgaagtattcctcataagtaagcagaactgtatgtagaattagaaggtcaacagaaagatttatctaaaaagttctgtttttcttgtagaaggagaaagttcagaggaaaataacttcttccaaaaggaaatgaaatctgtaaccacaaagtaactgggatgtttgaatgctgtgaaactgtttaacttcttccattctttcaagcccttttctttatactgtgttagaactgtgctttccttctgcattcttgtttatttccatcaccatcatctctaattttgaccattttaatagcctcctaaacagtctttgaaggctttgatctttcccaccttactcattcctccatactgctgccataattgtgtcaattctcctcttcaagaaattggaccaatttgatgtgtgtccttgttccttagcactacatatgaggacatacccttcacaatcaggccttatcttccatatctggcctcatctgctcccctttgctcatgaagcctgtgctaaaactatgctgaaatctcatgcttgttttcttttcttagaatgatcataattttttttctctttcacctgataactgtctggtcctcttttaggaatcagctcatagtctcctttgagaagcctttctggatttccaaagttagcagctcactctatgttattgccacatttgtttttcacactcatgtcagagtatgtatgttgcacatacatacagcgtatatctttttgaactgccgtcttccacactggattgaacttctcaaagacagggataactgtcacatctttcgtgtccatttctgtaccagacatatagttgatactcagtaaaattggttgaatggaattgagagtgcgtttgtcaccttcatgtcttctcagagcaccttatttcatttaccttccattaaagttgggttcactgcctacattcatttttgttattatctctgattgcacatattaggaactccacaaatgttgaataaaggaattagttctaatagcactaaagagcttataattaagagacaaatgtatttttagatgcaaaattatctaaagattttatttccttgatatacaggacagtgacaaagaacttcacatttcgtgcatttctttggtcacattttctttcattagaatgaattactcttcacttatgacttttgtgtgaacctcccgactcttcactctcagcttgttgacttgggactcagcaatgtcagcccgttccttggcctcctccagctcgtgctggagcttgcggaacttggcaaggttgacattggattgttcctcctgagaacagagatgcatttgagataacaagaaaattggacatttcctgattgttattgcttttgttacttcaggatttgcctcatgaatgagaaagaaaaaggctccgttgtccaggcatggtggctcacacctgtaatcccagcactctgggagactgaggcgggtggatcacctgaggtcaggaattcgagaccagcctggccaacatggtgaaacccccatctttactaaaattagcccagcgtagtggtggatgcctgtaattccagctactcaggaggctgaggcaggagaatctcttggacccaggaggcagagattgcagtgagctgagattgtgccattgcactccagcctgggcaacaagagcaaaactctgcctcgaaaaaaaaaaaaagaagagaaaaaggctttattatttagtaacatagttatttgagagcaaggcatcccacaaactcgcctatgtaaatgaatgtgcttatgaccctcctcaagtctctctctcacttgactctctttctggcaaactgaagaggctgcagtgataactggaagaacaaagtagcagggatctgaattcaatcttgtttctaaaaaagaaactttaaaaaataggtgcagtagtggcatttggtgccaagaaccctaaggaaggtttcagaattaacagaatgaaaaagataactgcagccaaattgaaaaaaaaagtcccaagatggatttatcatgaagttaaatgaagcttagaattcatactctcatttgcacaggtccatatgagtgctgggggttgtagaatgttctagatagggagggaagtggattgcaactaagaaacatttgtatgttaacatgtctggaaaattgcttaaagaggtctcagaagaaataaactcaaatctataaggctccagtaatttatggttcatttttctcattctaaatattcatgttcatacctaattatgtattcccaatttaaagaaaaccccctaaattctataaactttaggccccaaaaaacctggatgtgcatctgaacctttcatttccactgtggagatactcacagcctcttcagcttgtctcttgtaagctttgactttggtttgcaatttgtccaccaagtcctgcagcctgagaatattcttgcggtcctcctcagtctgaaagaggtgcaagtagatggtgccattattttaaaacaactcatgattttcttgaaaactataggcctggaagatatgaaaacactggtcacctggtaagtgagttccttcactcttctctcatgtttgcgaagacccttgacagcctcaacattgtgcttctgttcactttccacctcactttcaagctctctcacctggaagggaacaaagacgtttaccagtttggctgtaactggccacaaggaattgagtgaagttgtggagacctaccctggcctccagtttctggatctgcttcttcccacccttcagcgccagctgctcagcctcatccagacggagctgcagatccttcacggtctgctccatgttcttcttcatccgctccaggtgggcgctggtgtcctgttccttcttcagctcctcagccatcatggcagcctagttagcaaataaattttgaaaataatgaattctgatgatagcaggcagcatgcatgtgtcagtaagacaaatgctcatcttgcttacatcagtgatggccttcttggccttctcctctgcattgcgggcttcctggacgatgtcctccatctctccctggatttgggaaatgtctgtttccagcttcttcttggtgttgatcaggctggtgttctgtttcaaattaatgaaagagaagagaagcacatttacttataacaactcacattgtcattttacctagtgtacacaggcaaaaattattgatcataagaaatgtttagaataaaaaccaaattagaagataattctaagtttatgccttttctcctttctatatatagctctttaatcaaacttctaaatttaatttttgatgtcaaacatattcaactattaccattgccatttgtaagcatgaaacacagcccacaaaactcaaagtgctgtaccatggagcaccacaccacagctcatttaaaatgaatcagtaatttttagctattaactcatgttggttgactccat[212 bp omitted]gaggcaggagaatggcgtgaacatgggagtcggagcttgctgtgagccgagatcgcaccactgcactccagcctgggtgacagagtgagaccccttctcaaaaaaaaaaaaaaaaaaaaaaaaatagtagtcttgttgggataaaaatgagccaagaatcccttctgtttttggcaagttgatggtgtttggaatagtcaacttcagatactgttaataagaaaaatgttgcatattaatttgattttaaaattatataaagcatgcaattttaacacttctataatagttatgtttatatagtgcaactttctgaagtatacagtactatatatttattgtaaaagatagtagaacatacaaattagcagacaagaaacaaaaaataattactgtgctctcaccagagataaaggataaacttttatttatctttctggatgtttcctatatgtttatacgggaaaaaagatcacacagcctatattatttttaagttgcttttttaacttactataatataaacatcttcccatggcaataaattcatactacagtggttacatattagccattgtgaggatataccaccatttatttaacaaattcactatatacaacaaatgctaactagtattaataatggcctccatgaatttgaactaaagagcttctctttgtatcccatgaggttagcattctgtgcatatgtgatacgtaaatattatttagtggctttttgtttttctcctctattttatttgcctatctttttgtagcttagagttgcataagacaagacagctacaaatgttgtgtgtatgtttatttgtagatggtcttctgtgctttttaaataaaagtttctagaattccagattatttcaactcaacatgattatgccagcccataaatatactcgtgaaccagctaggtcccagtaaatccttacagcaccctgtacattttccagagctccaggaagggacgaagattactttttactttataaacaagcttatcttctcaaattatcttcagcttcagggagtacattttctaaaccatagtcttgaacctcacctgagtgtgcagaagttgcacacgttcactggcatccagaagctcttgctctgccattttcctgcctctctcagtccgttccagggatgccctgagctcttcaacttcagcctgcatcaggttagctctgcgctcaaccattgccagttgttccttaaggtcatcttggcctctgatggcatcatccaaatgtagctgagtgtcctacacagaaagagaaaaagcctcttactcatgctgcacttaaagcaaatgcaaacttatggtcatgtacactctttgatcttaatgacttagagtatgattagataggagcaatcggcaagtacctttaataataaattctttgtagctgagggttgcagttctactcaaaagaacatgatgttttattattttagaccctgaatcattaaaaaataccatggctagctctacaaaattttggatcaggaaagtatccttagacttcagcgagtccagtggtgctattttacatattaagcaaatgaagtccagattaatgaagtgatttaagcagtggcatgtagccaaactctttcatcacttcctctatctccctacccctcaccacagtgcttctctgcagataacaaagcaaactctgtcctgggccttccagaattaagctctttttcagttgtgtgtgtataactttgaactttgaactgattaccatgttgcttaggtgatttatgacacatagtcctcgtaaaacattaaaatttgagttacacagtagcactgagactgtacaacactatgtgtatttaccccagcataccttcagtattccttgtgtgtttctaagattccttagtgcctcagcagcctggcggttggcatggttcagctggatttccatttcattaagatctccctccatcttcttcttgatcctcagagcatcatttctgctcctgatctcagcatccagtgtactctgcattgactccacaactctgagatggttcctctttagctgatcgagttcttcatctttttcagcaatttttcggtcaatctcagatttcacctgatttagctcaagttgaatgcgaagaattttgccttcttcatgctcaagagatgccttaataaaagcaacatttatttaggttacctaaagagctttttatttctttcacattatgataatttccccaagaaggcattaaaaaacccataaactatcatacgtcttaatgtagcctattagctctgcattctcaaggtacaattcagtatttttcactgaattacttgtgttattccctaaagatttgcaacatgatagagatctcagttgctattaattttcaatttatttataatgcagagctaagcaaatgaaaaatgtacctctgcttcctctagggaagtctgtagttcactcttctcatgatcaagttgtttctttactttctccagttcatggatatgctttccaccctctgcaatttgctctgtcaggtcagaaatctcctctgtaataataaagtaccaaatttcagttaagtagaaagaaaaattgaaaagatgtctccctaccatttttgaaatagaatgattacagtgactcacgttgtaagttcttattctctcgctttagagtttcaagatgatccagggattcctcgtaggcattcttcaccttgaacagctcagtgctgagagaacgcgactccttctgggaggcctcaagttcagcctgagtttcctcatacttctgtttccattctgccagaacctggaagtatatagaaaataagcctttgaaaccaagaatgatgtcagtttcccccaaggggagctggtactgtggaccaccttgtcaaagtttctttgcttcttatcgagagctatgcaggcagcattagatcgttccacatcaatcatgaggtcctctacttcattctgtagcctctgctttgtcttttcaagagaagcacatttggaattcacagcttctacatgttcttctgcatcctgcagacgctgggctagcttcttcctgaaaattgggtcagtatgagtgaccaagagcagactcagagtcaccacagtgccctttataaagctgctgactaggaaagcatatttccccaagagttgtctacaagttgttgaatttttctaaacattttcactctcttagaattctgttttccctgttgagttcttatttttatccatctcaggtattgccaaacatatttacgaagcacctgtgtgtgtgtatgtgtgtgtatgagagaaagagaatataagttagcactagagctgagtgagcaatgtgaaaatttgctcctctttctttgtttttatttcactaagctggccctctatagtgtggcacattttcttgaactttgcctggggtgagaagtagaaaacaggaagagacagtacatttctcttttgaaacctgggatttagagatctgtaactacttgtggaaaagggctgagttttatttactttgaggaagaaatggcaaccatgaacaggaagcatatcaccaaggaatggtagcattgagtagtatctttaagcattttctagtatggttctgtttattttgcaaatgaggaaactgcggcccagagtgatatgttcaaggtcatacaatgaatcagtaactttctggatttggtggcctttgataataaatattactgcattattgcatttcccaaatttcctctaaaatcttgtctactactcttcaccaacctatgtaattcatgacctttcccagcccacactcttatctagaactctctctggaaatgcttgctacaaactctttcatcctgtttaattctaacaactactgagataaattaaatttagaaaggcttctttcactaggagtataatgctttttttccttctatgtgtaaatctgtaaatctcatgacttgtagtccgcaaacagtacgtgtaattagtgaatacatccattgatataggttgttagttgaaataatgacagcatatgacaaccttaatataaacattcaatactccatctgaggaaaaactgattattgttaattgtaatactcataataatttaccagagagtctcaatgtctcaatttttccttctattaaaagatactaattctatttaattcataaataatattctgataattaataatccatcttggtggaaagaaatttaagatgcttctggacaagaatgggtggagggatctggtctcattccattctccagtggacatacactgggctttaagaagaagaatatggtggaatccaccaacctataataaaataagctgaagtctttcatgtgtccccaagcccggaatattctctttcttctatttttccttcactgcctttacttttatttcttcctgctcccctgcactaaaagcacatacttggcctcctccagctcctctgtgcgctggatggcgtccgtctcgtacttggtcctccactgggcaacctcactgttggccttggacattcccctctgcagctcagccttggcttcctgctcctcctcatactgttcccgcagcaggtcacagtcatggcgggctgactgcagggcatgggccagagtgctcttggcctagaccaaccaaaaactatgtgatataagtttatcttctgatcattgaaattctctatgcaaagttcaatagtgtgttatgttgcacggttcaagtgattgaaagtatcagctggagaattctcaccttagtctcctcttctagctgcctctttaattcttcaatctgttgtgtaaatgcttgtttgcctcgggatagctgagaaaccatagcatctttttcatctagctgtcgtgaaaactcacctgtggaagacaaaacatcaatgatttagttctgttgtctaggtaaacaataatttaaagaatggaataacattgtaaccctcttatttcatatgatgaaaaaacccctcaagattttcagtgatgttgagaaggttatttcttgctttttaaaaaatgtatgagttttctttgatattttagaattcgagaacttttgagtaatgctgagtcacaaaaaatctcctgagcccagggagcttaattcttttccccaattgtcgcttagaatcattgcattttactgtctcataataaaaagatggaggaataagtaagacatgataaatgaatgtacagagcttgagaaattacttgtatttgataggtaggtaaaggcttgtctttcattcgtcacctctccgaaggttgatgctatttatttactgacctgattctgtgtgtaaacgtgccttctgggctgacaactcatttattaagcgttgttgctcttcttcctttgtttttatttcactaagctggtcctctagggtgcggcacattttctcaaagtttgcctggggtgagaggtagaaaacaggaagagacaatacatttttattctagaggctgggatttagagatctgtaactacctgtggaaaggggctgatttttatttacttttctatcaatcttgcatggtggctataaagtagtagaggcatttaatttggctaaataatgaacacatgattatcaaaattatattctctttgaaagtgtgaacatcatttaaattctgcatcatttagagtatggtttttagataaaccttttttgtaattacattttttttcatggtaatagtatcaaaggttaaagtgttttctacaaagaagttaagagaacttaagtgattcaatacaataatgtgtactaggagtaagtttaagcttcagatgccatctaatgtttgtgtaatttggctaaaaatagtcatatataaacttggtcattttgaattgttgcaaataaagatgaaaagggcacaagttaatgaagaccttggctttggagacagtctccatgttactagcaaggtcattgatctccatcttcagctcactcttttccttctccagcttctgcttgacccgctgaaggctgtcaatctgctccccaagctcagccacactatctgcgtgcttcttccgaagagcagctgccgtggcttcgtgctgcagggtggactcttccaggtccctgcgcattttctggaactcagcctcccgcttcttgttcatctcaatctgggctgaagtggccccaccggcttcttccagcctctcactgatctcctccagctcccgggagaggtcagagcgctgcttctctgctttggcccgggaggcccgctctgcctcgatttcctcctccagctcctcaatgcgggcctggttgtgatatgtcaacattaatgtgaatttatgtcagttttgtttcctgtaatgcccagaaaaggtggaggttataacttacctgtaattctttgatcttcttttgtagctgtattgcaagggcttgttcatcttcaatcttgccttgcagattgctcatttcaaactctttcctattagaagagcaacacattagcttataatcacttctcttaccaatcttcttttctatgtataatctaagactttttttatactgctggtgttgaaggagtgagtagtacaatgttttacagattaataattgtattagtttaattaaataaaaaggtcaaagatgtcattatttttttccatatgtcatgatgtaacattttggagatctttttagcgtatgtttcatttgcattgacatacaacaagcaggttatagctgaattataccatacttactttttgagtttctcattaagttgctgtttgtcattttctgtatccattgtggattcttgggccaattttaggtcaccctccagttttctcttggctctttctaagtccatgcaaagtttcttttcttgttccagagatccttcaagctaaatttatgatgcattttatttatttcagctcttaagcactgaaccctatgctagtagccttcaaagatacataagaaaaaaatttaaagatacaacaaatagcacaagaactttattcacagaccaagcgttaaaggcttatgactatcagtgctggtttcatgtcacaattgtttatttcattgcaaggggaaacattttctttttcacacttacatcgtccacttgctgttctagcttggttttagctttggtcagggtgttgactttgtcctcctccatctgcaggtcatccagggtctgctggtgggcctcctggagagccttcttctccttggtcagcttagcaatggtttcatccagacctgccatctcttctgtgaggtttttcacctttagattagaacagatgaccagaatgtcaatgacaacgtattatcttgatgaaaaacatgatgctgtagtatcttaggataatgtcagcgtaagatggaaaatgagaaccaggagctaacccaggcctataatggctgaaaaaataggaggtaaaggtcaagtaagtacattgaggtggtgaagactaaagagatgaaatagttatgacagtggtattttttatattcaatcatcttaagattaaatttttaattaaaatacttcagtatcaaggtgcttataaatattctaaaatggatcatgatttgtaccttgttctctgtggcatgtttctccttctcaaccttggccagtgtcagctcaaggtcatcaatgtctttcttgagctctgaacattcatcctccagtttcctcttcttggctgtcagctcagcattgatctcttcctcatcctcagctctttcagttacctctttgattttggcctcaagttggattttggttttaatcaactgatcacatctttcctctgcatcagccaaggcatctgcttcctaaagggagaaattaagcattttcatttgtctgagctatatctataagcacacaataatttattataaggtggaaatttcagtgactacctgtttggtcaacatgtataccagttgctaacttttaaaatgaaacagacaaaatgttaatactgttatctactgatcaagtataataacaaatttccttcagatattcatgtgtggcaggccaaatcaggaaaactagccctttggcaaaaatctgccactttactaacctttgcaactttggaaaaatcgcttgttcattgtaggactcagttttctcacatttaagaggggattaacttagccatttctctgccctgataaaaacaacataacttctattttatgcacaaaaatacactaaagaaagaataatctgatctgagagaaagttccataaataaaggaaaatgtctattgatatttttatgaatttgctcactgatgaccaaactgtgtgtgaatgcacatatgaacgtgtgcagcatgatatgtgactttgcatctattgcttctttatgcccgagtcttggtgtttttgaacagcaaacaatcagaacaaatgtttcagtggaaaccattcattttaaaacgttaaaagtaataagatgtggctgaactgcaatgtataatacttacagcttgaacttggagttgtaagtcatttttctcttgcattagcgtcaccatcttttcttctagttctttcctttttgcctctgtcttagccagctcttctttggttttctcaaattcttccttcatgttggccatctccttctctgtctctgcactcttgaggaggggcttgatcttgaaatacagcttcatccagggccagtgcttcacattcatgaaagcacggatgttgtactgaatgcagaagatggactctctgtaggaaaagaaaaaaagatgcaaatggagaataatgtggaaagtgatcatcactcaacaaaagtaatgactgcagtggattcatttatgaaagtgtggagcaggaagacttgtgtgtgggctctcacctcctctccatcatctttctgaactccactctcatcaggaaccctctgcatatggcttgagtgcgcgtgatgagttgagctagcttttcatctcgcatttcctctagagttcccagcaggccagctttgaagaaaaccttatgaaagaacaagttaaatatgttatttccacttacaggaaagtctaaaagtgatagaattatgacagatagaaatttggactggtgataccttggtatgaccgaatttgtactgggtgtggtcaatttcaatagaccctagaagtttctcagaagccttcttgctgtcaatgaactgaccctctgggatagcactcgcatttagaaccttgtatctgtcagaataaaaagaatataaaaatgtggtttttcttcactgaaaaaaacagtagaacatttggtagctatcattgaaaagatgatagattaagttttggtgaacaaaatgccatttaaaaagtcagtgctttatttaaaacttcggaagatatgatgaaaaacttatgataatataaacctaagcttctttcttttatgatcaattttcaaataattgcatgtcatttttcaaggaaaagtttaaaaatgttggaattatatagtgattttgtgtagactaagacattggaagggaaaaataatgagacacaaacctctgtttgaagtctgcataaaggattctgcttgggaagcctttcctgcagatgcggatgccttccagcacaccgttacacctcagctgatgcaggacaagctcatgctccatggcacctaagagaatgaatccacatgccatacttcgtggtctatcgcacacacactggagcttgtctggatatcagaaatgtcttaccaggagttttagtttcattggggatgatgcaccgcacaaagtgggggtgagtgctcctcaagttggtcatcagcttattcaaattctcctgtggaaccatatgaaaagttttaaaatcatttctagttgcatcgacatgagagtccctatcaatatttgtctttcatttcacattttaatgagctgtctcaaggaaaaacaaattatcataacagagaggaatcatataagtggagcacaggtaggaaattacagattacacaaaatcagttaatttcagtttgttattctcaagcaccaccagtcagagaaactttgtattgcgatttttgtcacatgaaggagatgtaattgaatacagtggttatttttaaaagagcatttgatttcatgtgaaatttgtacaataccagatctcttggatgtagggctcaggggcaatggttcacgtatcataaagattgatgtgaagagatatgtagtttgtttttttgtgctaattttttttcctaagccatttaaaaagtttacaaaacctttagtagtatactaaaaagtatactgtactactttattcactttcaccataaatatcttttaaaaaattttctgttttgatggtttagttttttaatgaaagtatttatctgtaattcaagaatatactgtaccctgaaaagagctgacactgtctggaaagaagaacccttctttttgccacctttctttccaccaccaccctctaaaaaacaaaatgggaaaaataaagttatttgcaactgccttttaagtactatccataaacatcaggactgccaaaattccctttagaatttaaatttgcactcattcacttgcatcattcctattctttccatatctctcctccctcaattgtagattaagaaagtctaagatttggctgactttatagtcattcatgaaaaaaccaacaacaaaagaattgtgagtgtaaggggtagatgtgggtaggggatgggactcccctactccaagtcagcaatgtctgttctctgaaggaagggccaaggagacagagtagtaatgccttgttagtgcaggcctcacttggacaacaggcagagttgcacacttggtcccaggtaggtgagcctctgctcacctgcagggaaatcctggctcccatttgcctgtgcttccatggtgttacttgcacatctggtcttagaacacttaagagaacagaacttcagttccccaagcactagggccctgacaaaggatttccttatctccagcctagctggagaaccttgaaagaaccaatactattaaaatgatagaaatgagttttatgatcctgagcaaatcacttaacctctctgagattcttgttttctcatgagtgaaatcaggctgtgggctaaatgctccatagtgtcacttagctctgaaagtctgtgactgtaagactgtatcacagttattaaatacactttctttcattaggcatgtattggccagtgtttttgtgtcaggttttgctgtaactacatttgtctctgttgaacagtgtatatctattttgtgactcttgtaacatattagtgctattaaacatgacctgcttcagcagtttgtgccccagagaagaggaaagccagagtcttcattgcagacttctggtacagccccaccacagtctcattcagggggtccttgtttttgtccagccagccggcgatgttgtagtccacggtgccggcatagtgcaccagtgagaagtgagcctcaggcttgcctttggcaggcttgggcttctggaagttgttggattttccaagatgttgttcatacagcttgttcttgaaggaggtgtctgttgccttggggaacatgcactcctcttctaggatggagaagatgcccataggctaagaataggaaaaaagggatgataatgatgagtccctcagaaagttatgctccatgtaattgatggaaaactgaaaatacaatgtttcaaaagaagactttgaatgataaattaaataggcatgacatgtgaagcagtcattatgtacccagaacatatgggaaatatacttgctagaaagactcagttaaaaaaaatacatctgaactatttggcacactttatgttcagtgtataaaatcagattctgaaaacatcacttcaaaattgaattctttattccataaatgtatatatctgactactttctttcctactgacaatataacttcctttacctcgaatctagaggtgacagaagtatgaagggaagagagattatgtgtaaggactaaaaatgatccattcctaggaggaaattgcatcttatattgtatcattaaaattctgtactttaacctatattctctaccactgtggagttaagtgatagtaatttggttttgctttctaagagtttggcttttttcttaatgtatttgataggaaagactgaaagaaaattcaacattgatgatttaacaaattcacaaattgtacccctaagactattttggtgatacagaaactgaaatactagagaataaaataaatgccttttctgaagaccataaagttttcatgaatagtagagatattatatcaccagattaacgtatcttttccccaaattgtgcagacctagtctgcttttaaactcttatctttcatatttttgtgaattttaacctgagtattttaagttttcctaggtggcaattgcatttacgcttcctttcccactgcttagggtagggttcacacatacactttattgatatcaataagtatatgacaagctcccaagatacttttggaagtgtttaacgattgcttgatgagtgttaacatatctagatctgatgtaactattgcttcacccccttagtaatggggaattcagggcccattttctaggtaagtgatacagaggtttggtgtttattcagtagttatcatgaacggggaaagacttaatgactgcaacagttgaaggactaaccttccaatctttaagacgtgttgacatagcctgccttgttacacatgagggatgatgataaatgcacaatacactgtcatgggtacaccagggttaattacacaacccagaggaatagctgtaatttcatccctttctcccatatgcatgaaatagtgtaggaagaaaagtgagggagaattaagtttttagagggataaatgcgaatccatatgtgtgtgagtgataaacatttttctacaaactgctctacttattaataacagatcacttggaacatacctcacaaccaatcagaatatacgagtgtgtcaggaaacagcactgcttgttctttgagaacagggagtgtgattaagcacagggaggcaagcaatttggttttcatgttttgaaagctagaaaagtcatatgaaccttctcgatgagctcgatgcaggcagccaggtccatcccgaagtcaatgaactcccactcgatgccttccttcttgtactcttcctgctccagcacgaacatgtggtggttgaaaaactgttgcagtttctcgttggtgaagttgatgcacagctgctccaggctgttgaactacagaacaagataaatataggaaattacgcataacaagtattctatctacagagtatctattagtattttcttctgaatttaaggcattttggtttattaaattataaaccttcagattgttttcctattatatagttctaaacaaagtagaattgattctttgaatacttattttccaagtaactgcatgagatcatgcatactaggcaaaatactgttaaatgaggactctgaaatatttccttagagtaattttaaaaaggtgttctcatgctcatctgcttggatccaggatagattttgactattttaacctctcagggatcaacttttgagacttctagactcaaaagaatagaattttctcttttcctatttatacctatttacttttcatatcttttcaaagactcctttcagtaggaattacatttgtatattttgtaaggtacattttgtaaatgtgattttgtatgctctaacaagaggatttgcactggctaattttctgtcagttcactactcacatcaaagatctcaaagccagcaatgtccaagaccccgatgaagtactgcctgggctgcttggtgtccagctgctggttgatgcgggtgaccatccacaggaacatcttctcgtagatggctttggccagagcacccactgcattgtacaccttcaacagaagtgatagtttagttttttaaattgaaaacagtgatgaactcctgagtcacttgcggttcaaataaatcagacaatttaagtcatgtttacctgctgcacagtctggcctttggttacgaactcattgccgaccttgactctgggatagcagagagatttgagcaggtcagcagagttcagacttgtcagataagcagctttgtcagcaactgtgtgaacaaggtgagaatggtgaaactgaccatggcttacacaatttaaaatgtaaatgatgatgacaaagaaaaaaggtttcactcaaaaagtaagatgtgcaaatgtcattgaaaccttttcatttgttcatattgcctcaaaagcattgccaccacttgcactaattttagtcatttcttgtgatgataaattggaggttggggaatcgatgctgtctgtgatatttaacctggcaaaagtagaccacagataaaaataatttgagaaaccctaacctagaggagtagtgacagaaatattcagatctctgtttctttcagtgcctgtgggcacacagattatcctgaaataaaatatgttttagtcaaatagcaaatatgagcttatgaaaagccaatgaataatggaatgagcagaaatcacaaatctgctaaataatgtaaaacgtcaggcagtgtgtaatttccttctcgtaatacttttgcccttcacgagctaggtcagagaaagtaaaaacacggtccctgcctctgaaaagttcactatgtcagctttgtcaagtggaagataccaacagggggtggtaccttccgtgccatctggctctgcctgctcttccctttgcttttgcttgaatttcatgttcccataatgcatcacggctccagtgagcttgtaaatggccaccttttcatcagcagtgaaacccaggatgtccacagcactctgtcaaaagagttgaatttgctcatccccaattagcaccatggaagaatccctcagaacaccggggctgtctcccacttttttctcatcacgccttgccttatatttgactagcactttgccatcttcaaaaggtactcatatgctttaccttttgatccacatggcaacacgaagaggtatgcatcagtctttccatttgagtcatgagtccatttggtcacagcatatgatgtgacttgtccacactcactgaaccaggactaagagccatgacttttgatgccaaggccagtgctttgccccttttctccaccccagcccccctttgcttctcaggcacatgctcctcttggtcttttggctatttttgtttcttttctccagtctcacgagtctctctgttgctccttcttctcctatttgtcctatcctaatgcataatcccagtctaccttcccctgctaatgggcatgagtgataaagttggaaagagggtatgaggagaacagcaatggttgtgagtctttctccacatgcctctctgatagcaagccacagctcagcgaccacgagatgcctggggtagcaaactttacctagttatttatttctcatgcagagaagagacatttatgaaaagaaggaattttgccatttagtataatatttctgtgtcttttttctctatcgaattttgattacctttttagttgcccacataggctttgaaaaggcttataaatgggggcaggattcagagcaggcagaggaaaatatgtttatttaccattcttacctaagactctttccccagattattgacttccacttccagctcactaactctacctatttacagaaactagacattattacggaagtcttagagcaagactgctacatttttttaacctcgcagaccagggtgtgtttcttaactccctatcacttttggacatacaaagataataataagttatagagagttaaagctgatatttataatataaagccacacaaatgaattattgacttcttgaaaataatattttaatagaaaaagcagttttgcaagcactgtcaactctaacttgggggtattgggatagtcccactgatattaaagttaaaaataaggaagattattcagaaatcaaaagaaagcatgaaatatacataaagtttacatataaagaaagtaagccaaaaagcaataatccttaaaaaagaggtgatggtggggagagagtgcgttgtttcaaaaataaatataaaggcttatggagtccccaaaatgagtgtttttgaagtagacaacccacttcttctaatgctgcttagggagtagagagggatatatcattggcccacagaggtttattcaaaataaggcttatgtttacatgtgactgtagaagaacagtgggagttccatgtttagttgtaataatattgcagctccttcccagaatcttgggtgtgaggtgtggcataaaatagcagagaaacattaatattggagcataaatatcaaccaaaaatgactaataagaaagatagaatgaaaggagcctactagctaaggaatactaaagacccaacatttattacaggcagtgaaagctttttaacacatgtagggggagggtattgaaatatcctacaatttttttccaaaagtaagaaagcccaaagggttgtattacctatttatagtctttctgccactgctttccaccctaatagaggagagtgttgtacactggaaaatgaatttactttttactactttgtacctattacttacatctgtggccatcagctcttcctggtcatcaatgctgggcacagtaatttccccttggctgacaaatgcgaagtcatatgggttggtggtgatcagaagcatttctgaacacatggaaaagaacagtatatagacagcattgctttggtcatcaaaaacatttcagagaggcttcttagaagggctgttattctttggtagaaataaatcaaagatgtgtcttaccaatgagctctggtttcttattggacaggatttgataaaatatgtggtagcttctttcagcctttagctgaaaagtaactcgggacttctctagcagatctggaagtcagattaagctcatttaaaagaagatgccacagtgaaaaattaagtgtttgaaaatttcacacaacagaaataagtacaagattttctaatatgtacccacaaagaaaaagattctcaatcactaatatttattaacttacatgtttcaatatctgcagaagccagtttgcctgtggcaccaaaatggatcctgatgaatttacccttaaaaaagaaaaggagggattattatacacattaaaatcagaaactatttctttagctgtggaccaaacaggtggaaaaaatattgacaccacatgcacacaagaatcagtgctgatcctcaagaaaatgaagatcaagagacttacaaagcgagaggagttgtcattcctcacggtcttggcattgccgaaggcttccagtagggggttagcactgatgatttgatcttcaagggtccccttaagagaaatgaataagacagacaaagaaaaaagttgcagtaaataatttcccattgacctctttcccttccccattgcccctgcacagtattctgtaactttgggaaaggctttctaaaatgagttaaaaagaaggtaaatcgggaaggggagtgggacactccagtgatgtggtcttgatttctgcatcccccaggcccagaaaagcacctaaaaaatgattgtgagaatttttgcctattatacttgccaatacattgccctattcatctcattctcatgagctcttccaagagttattttccaaattctggcatcacttgcaattggctgctatgattttgaagcaccacagtcagttaaaaaaattaacctttattttggattcaggggatacatgtgcaagtttgtacatgggtatattgcatgatactgagatttagggtatggatgatcctgtcatccaggtaatgagcatagatagtacccaataggtagttttttggctcttgcctccctcctacccttccccatctagtagtctccagtgtctattcttcccatctttatgcccattcatgctcaatgtctagctctcacttataagagaacatgctgtatttggttttctgttcctgcattaattctcttaggacaatggcctcctcatgttgctgcaaaaaatatgattttgatcttttttaaggctgcatagtattccatggtgtatacgtactacattttctgtatacagtctactgttgatgtgcacgtggttagattttaaaatctgttattctgtccttagatgaatatcatgcccacctgcattttgccagaggcaggttcctcttttttcttctctccagtaactgcaattgttgcaaagtactggatgacacgcttcgtgttcacagtcttccctgcaccagattctccactatcaagttcaaacagaagaaaaggtcagaatctaaggtagtagtagccactacaatgatcaaaacagaaagaaagtaacgaaatctacatacgtaatcaagattgactggttttcacgatctgtaaaagagaagccaaagataatatttagaaaaacacacttaacacataggtcaacgcagtacttataaactcaaaattgtcttttaaaactccccatttgcaaaaataactatatgaatttgtgctttgcttctcataaggtttttctaaaaataagtatcaaagatgtgctaattaataatcccattacctttctaatgtatagactatgtaatgcatcattttaccattttgtccatgagaataatctatcaatatcagattaataacaattttgtgtcccatccagtcacctggttcatagtacaaaattatgtcaatgtccaatttaaagttttgtactgtgcttgtgataacttgtcactgtgagtcttcaaaacttactttttaggagagattatgtattatctataatccaaatgcagagttgatgcctaaatttaattaattttgaggtggaactagcattagttaatttggattttagcatagaaatctaagcaaaatttcctctatttttggaactagtgcttagcatagaaatctaagcaaaacttcttctatgtttggaactagtacattttattctaaatatatttccctaattttattatttctgttatcatgtttgtgctgaacagttattctcagaatactagccctatgttttttctgatatcagtatacaactattttacaaatggctatggaaattgtaattctcactcaccagttagcatgaactgataggcattgtcagagatggagaagatatggggtggggcctcctggcgctttttgcctcggtaggctgtcaccacctcagggttgtacaccggcagccacttgtaggggttgacggtgacacagaagaggcccgagtaggtctgtgggaaaggacggggttcctcgatcagcaatcaccttgtttatctatcttggaaatactgtttaagggcaagtagagcaggacctaagtactgtgttagttctcataaagtttcattcatttgttgcctccttccatcattgctgct[138 bp omitted]gcctc[224 bp omitted]gtacattttaaaacatatcagagtttacaacattaaccaaacaattggtcataaaagaacagttcaatagccaaatgtattgaaaccccttaatttattttagctaacatgtgtagaatgtggagtgagtgagaaatagcgttgaaagggtgctcacgtagatcatccaggctgcgtaacgctctttgaggttatacagcacagcaggctcatgcaggtgagtcatcatggccatgtcctcgatcttgtcatatttgggagggttcatggagaagacttggtcttctttcacagttacagtctgttaagaaaagaaaaaacaagtgcatatcaaataagtagcagaaaaagccaggtcaaaaaaatatcacctaaattaacccaaaatgaggcagagtctaattagctccaggtgtttttactcacagctccagcttcggtcttggctgtcaccttccccccttccctgctctgcactattgctttcacgtaggactccttagggtccaccacaaagactgatgtcttggcatcaaaaggcttgttctgagcttcaattcgctccttttcagactttcggaggaaaggagcagcctccccaaaaatggccatctcagagtcagaactcatggctgcaggttattgatggcagtactggactaggtatacctagaggaagaaacagagccaaatgatgattcagggttggggtggagaattgttctgttgatttcatattaatgtgcttaattttccatgcttgtttcctcacccctgcctttagggaccactcctgtatactatgtcaaggagctgagagatcagctcattgatttgaaagcactatgttgatagcttaatttttgtgatactttaagcctaagttccatcctctatgttgtaaaccttagttgagaaatgtggaggaatcaacattcaatcagcaacatttgtgatgctccaagcatgttcagaattttttctttttcttgctacttttcttttctttcttatttccaacttccccctcttaacatcgtgatgatacaaagaaatggacaataactgtttccactggctttacaatataaatgaacctgtcttaaaaactcaaatacagatctttatgcaaattttcctctcatcccaaattattaaaattggatgtcagatttactaaaattgaatgtagacagatacacctgttctttccggacataagtccagatctaatcattacaaataaacacctagttaactgacaggtattaggtaagtaaaggaaaaaataactacaatgaaagctgaatatccaacatataattttgccctaagttaaaattaaaatctcctttattagttttgaaattgtttgaaagtcagaagtagtatctaaaccaaaaacaactttaaaagattcttggagaaaaggaacttcttaatttttaataaaattttatagtgattgtatgtgttgatctgtatttctctttgtttttagttggatttcaacctaacatattttaaaatctgattcttattttcttaggtttataatctcgttctttcttctcctctttttaaaaataccaaccagtcttctaaatatttttctgaaatggatagccagtataaagtttcaagccaaaatgaacttaaaaaattttccctactgacaaattaattatgagaaaataaaataagtcctgctgtcctgatggcaaggacagggtgagtggccagaataaaagaaggtgacctctgtggagcagaagtgtcttggttgccaatgacaatgacagcaatgatggcgacaacagcaatagccaccaccttctgtaggctttccagagtcttgatcttttgtcatcagcattaactttccctcaacttaaaatgttagctatggaatttccacatactctattttcaaaatcagtcttatctgtaaaagtgtcctgatgacactgtgaaacttagacatattttcaggggatatatattggaacatttaatgtcaggttttttttctttgaagaagaaatgttatttatattacattatattttgtttctgtgtttgtttttacaccaggcaacttgaattaacaacacactaccacgtggaggttactataatgcagtgtatccaggaaacacagaaagatgattgctacccttcccatctcctgtcttattatagattaattgtttcccaacttggggatcaagccccaatagagcctcaggttgttgcagggggttcttgaatccacccacacagtgatcattgcctcaagtttaaggaaggaacatttccacatgaacagtgttttctgttcttttctaaatgaatatagctgctatgttaaatataaactcatttaaaataattcttaagtgtagaataggttttcatgattatatatatccttaacatcatactaaaagtacatgtctccacatgaacaattagcaggattccattagttttgattctccattagcagggttccattaaatgttttgattctgtggaggagtccttgaaaaccactgacgtcaatcacagttggcaagagctggaaggaccttagcagtcaatagaatccagcctcctcgtttactgatgaggaaactaaggcctagaaaggttcagggtcattcagtgtcatagtggtgggtgataagtggcggtactgggacatgagtcctgttccgctaaatgcaggtttgttaattccacttgcaacacactgtatttcaagatacataaaggctaactggcttgacccaggcaaatagaatcagtgaaaagcctggattggcacctagaaatatcgacttccagataaacacaccttgattttatcatgcggtctctctgatatatctttatgggttaagttggagtagtagttcacattaaatattacatatgatggctgcattctttctgtagttctaacaacatgtgaaagagaagtttcattaagttttgtttgattaagtggcctgaaaagtcaaaattttatgagaaggcatttttaaagaacagctgccccgatatcctattcccaatactaaactaggaaataaaatggtagctcattaagatgtagcaatatagagattcctttgttctttagagtgtaataataaattattcttacctcttgtattatcagatgaagaaggtggcaggctcaaagcagacaactactgttgaaagaaaaaagagaatgtgggatgcttttttttccccatttaatcacaaaatactagtaactatattgtctacaatgtcgtccttaagaatgttggaaagaataattaaaatttgggaagcagtagacatcccttaaatgaaaaatcatcatcatcaggaatgtaaaagtaagtgttcttccacatatacataccttcaagaattttgaggaaggatgggaaagaggcatctcagctccacttttatagagaccattctgcaaacacagcagccacctcagctgtcctagctgggaacctacttggcaaaaccgtttttggcaatctctttgcacaatattcactgactgtggctgtgaatggatataattagaaatatttcttgacacccataaataatttaacagaggatgatctagggttctttataggcatttgataggggatggggattcagggcttctaacactgtttctccagtttggctgttgcatcattcatcacagaattcaaagccagattcccacttactcctctgcctataaaattggtccaacagaatgagtctgatgtgaggaatttaggattaattaatttgttggttcttagagccattaaggagtctggaatgaattttagacctgacactatgattggaagcagtgagcgatggattttaagacaacattcctagccacagtctggattttagaaagactggcgatagattcttttaaagtctgaaagtctaaatatgaaggtgaaagtgaattctcagattaggcagtggtgatggaccactgggggaggcataagggatttagaatagatataaacacttctgttctttttctggaggactttccatggatatctccagcttgtatgttttcactgaaggaacaacaggatgctgtgtgatgttccatgcatgtttcctctgcataatggaaggagacacaaacatgcattcctagttcatgggcagactctcatgactagctatagctctaatgaggtgggaaccacatatttttatttaaggtgggaggaaagtcatggtatccacgatattctccctgtggattgaaaagatggatgggccatcacatatgcccataatactcataaattggcttttgatggttttgctacatacacagctgttactgaatatggcaggaaatatacctactctaagtgtgaccctaactgagctctggtgagatattttcaactatcattagctggcttaaattaccaattaatgagatcactgtttttataattctgttgacttagaatttatctttgacacattgatagattgaatcttttatactttaaaaatttattttgataaaattctatgaaataggtcatcaggcgttaaaaacaaaatctccatgaaaataactcaccgaagtctagcgacttacccaaagtgctaggctctaggccagaaggaaacttgttctattttttctctcagattttcacaactcatttatttttacttcttttggaacttaacatctgacttgcagacataataagtatgtattatatttactgtatttgaagttgaaagatgaaagaagaaaatatgaatgagaccaagatacatagatgagttataggattacagatagtgaggactctttacataatagttaaaactctgatcaattacagatagactgatcactcagattttgaaagctctgaaacaagaccataatattctagtgggacccctattatgggccaccaggagtggatcagagaaccttgcagagcttggacaaggagagaagagaagcagcactgggtgagggagtacacatttcccttagacttgcctcttaaaggattgtctacatagaaaacacaggagattaatgcgaaggcttttgtatttgtatggttctttgtgattagatatgagtgggaagaatggctccaatctaaataaggagaattattttggaaactgtctttaagcagtctgtgtaaaagctgctcgctctctactttcctcagattaggaaatattataggcttctataaccttgcatttccttatctattaaaaacataaatgtggtgaaaatcaaatactgccttcaccttacggggttgtatgaattaaattagattttatatatataggtatcagaaattatattattatatcacatatgggagattatgtatactttattatatgcaatcttatgtaattcatacatgcacgtatgtaaactgcttaggatagtgtcaccaggggcagctgaagcaaacatttcttcactagagatgaaggtcacaatggcttgctggtatttctcccaaatatacccagggagttaaagtggtagtaaagagctgaagacagatggtagataggaaatgtctaatgaacaagattattttttttcttttaaaaattttgtttaaaaatacagttgggacctaggttggagatgttcatgtcttagcttctatagtgtccagtgtggcagcatgacattaatttaaaaaacccttaagattcagcaagtcagactggtgtttgtcttcttttaaatttctctgagactccaaagggccatcactactgaaaagaggttgtatagtcactttcaagtcaactacttttattacattctacatagttatatttcatcatgtgggtaggtcattgactcacttgtttgctcaatacatacttacagagtgtccgctatgtgtcagctgttgttatagcacaggggataatgcaaaaaactggcaaagccctgcccttatggcaatttcagtcagcaggggtggatatacataaacaaataaacaagtaaatatgtagtatgtcagatggtattaactactataaaaggaacaataaagcagagtaaggagtaaagggaatactgcaccaaggggagtgacctggatgggcttctgtattaaggtgtcatttgagtagaagtttgagagaagtgaaggagcaggccatatgaatatctggaagaagaattttcagacagagggagcacaaagtaccaagtctctaaagtaggagtatgcctaaagtgtctaatttgtgataacacgtatgaaccttgagaatattatactagtgaaataagccaggcacagaaagacacatacaacatgatttcacctataagtagaatctgaagttgaattcacggaagcagaatagaatagtgattaccagggattgagggttgggagaaggaattagatgttgattaaacgatatacaatttcagttaggaggaataagttcaagagatctattgtactgcatcataactataattaataacaatgtattgtatacttgaaaattggtaagaaagttgattttaagtgttatcaccacaacaaataagtatgtgaggtaatgcatatgttaattagttgaattaagctattccagaatgtatacttattttaaaacatcatgttgtacaccatgatatgtgtaaatatatataatttttatttgtcaatttaaaaaagcagcaagaaaacctgtaacaggagcaaaatgggcaaagaggagagtggcaggagatgagttaggaagggtcaggtaatgtaggtccttatgggactatagggactttttggcttttaatctgagtaatatgggaagccagtgagaattttaggaagagaagcaataaaatctgacagaatgtaaaaatcactctgctttctatgttgagtgtagactgcaggcatcaagggtaggccaacagtgggcagcagggccaaggatagataggcattgccacaatgcagatggaatagagtaatggcttggactgtgtcctagtgactatagctgcataacaaattacccgaaatatggtggattaaaacagccattttagaaggcacatgcattctgtgggtcaataatttggaaaggacacagtgttctctctgttctccaatatctggggcccctaagatcccaaatcctgggggtgattcaacacctagggacaagtacttataataatgattagagaaaaaaaggattgttgagaaggataacaaataaatgaagtggtatctggaggcagacatggggtcaagataggaaaaactaagcatattgttaaaagatgggcaagattaaatatatttgtgttggggagaaaaattctgtgagttaaacaaattgataatgcaaaagatggaggggctagaatccagaggctaaatggaagggttggactctgatgggaacaggaacactttgtgtattaggaaagaagactgagagtgaaggcaagttttagcttagtagatttgatgctgaaaagatgagggagttggtacttatgggacagtagggactttggcttttaatctgagtgatatgggaagccattgagaattttaggaaggaattctgcttgcttctgttttctcagtgacgtacgcagcaaagtcattgactgagtggaaggcaggggaggagatgtagtgggtatatagagagaagatgtgaagtgttcattttggagagtgaaaggtatactacatgtccccagagtactgagagataatcatgaaattaaagtgagacctgtttagcaaagttacatgcttttttcccacaactttgtttgcttggatgtgtccacagaaaagatgaatatttgggtttaaccaaggtaagagtttatcgggtaagtgcaatagagggagagatgggcaagggagctaagaatcttttcaagtgtgtaattgtaataatgttccataaaatttaagcttgaataaggaaggaagtgagaatatgaggggacacaccagaacaatgaaaaagtggaggggcatcaatggatagaaggtcttgatgatatcaaagaaattgtagggatgaaaatctggagtaggtgagctggaagaacagaaggtattggatagagattgattgtaataaatcccaattggttgagatgtgtaactctttttatacactgttggatttgatttgctaagattttgttgaggatttttgcatctatgtttatgagagatattggtgtgtattttttctttctcataacatctttatttggttttggtatgggtcatgctggcctcaaagaatgagtcagaaaatattttctctgcttttatgttcctgaaattattgtggataattagtattatttcttccttaaatgtttcgtggaattcgccagtgaaaccatctgagcttggtgcttttttagggaattcttgattcaacttctgcaatagatatagtcctatttagattatctgcttctccttatgcaagtttgtgcagaggctgaatagtatgattgaaattgaggttttggagaaggtacacacatagtgatgatgattaagtcaaggatgactatgtgctgaatctaaactctggggagtcccagaggccgttttctatacatgcaaacacatttttgtgcacacatatatagtgtatatatttatacaaatgggattgtattatacggatggtgtttatacaaatgggattgtgttatacaagtgggattgtattatacaaatgggattgtattacacggatttttttttcattatactgtattttgagcttctttccatgttagtattcactcgttcaattggtatttattgagcagatatacaatggtttaaaaaccaaagtgcttgctctgatagaacttacattttgatgggggtggtagtggagacaatatgctcataaaaatacttaaagaagaatttcatattccaagtgctagaccatggaaggtataaattagagtaacgagatagagattgatgtggggagaggaccacaagaggtaggcttctttcagctgtgacttgaataatgtgaaataattagccatgcaaaaatctaaatgaagagcattccaggtagggaaaatttgggggaagtgagtgagaaaaaaatagctccgtattttgaatgcctactacaaaccgtgtgtgtattctaaacatttgatatacattgcttcatgttatcctcacacaaacccgaagagtagaaagtactattattaccatatactgaaaaggaattgagccacagtctgagtaagtaaattgcccaggccacataactctggtgtgtggtagagttagtgctcagctcaggcaggtttatcccagagaccatggcatatccttttttccctcccctcccctcccctccctttgcctccccttgcctctcctttccttccctccccttcccttcccttcccctcactttttttctgagatgggctctcactctgttacccaggttggagtgcagtggcactatctcggctcactgcaacctctgcctcccaggttcacgcgattctcccacctcagtctcctgagtagctgaccacaggcacgcaccaccatgcccagctaattgtttgtatttttggtagagacagggtttcgccaagtttcccaggctggtcttgaactcctgagctcaggcaatccacatgcctcagtctcccaaagtgctgagattacaggtgtgagccaccatgcctggtgctttgcctatccttttactgtatggcctctaagggcccttccaactcaaagattctatatttatctaatgtggtattttattgacacagtaaaggcaatgccagaagtaaaaagctaacaggataataagtgagggacctcctgtaaaatgacttacactttatgaaaacctacatgtatgggaacttcatgtgatgttatggtatccagttgttgaacataccataattcttatccaccagaagcagacatattcaaaaccaggatgccacaaataaattaaaatcatgacacatagaaatatggaaattacatgactctgaaagatagaaacgtatagagacttatgttttctttactacaggatataagtagagacttgaacctgtttttcaaaacttctatcttggtgacatattcatcatttggccccaatacacgaaacagttttgctcactcaccacttacccctcctggctgtctacacctttcctcttacttcttccattgtatgaatagagaagtgtaaatgtgatgttataataactcagaggcacacattttcttgggcaagcaagtctcagtgggaaaaaaattggagagatagaatctttcaactctttctagttattctgtgttattatttaggacctggattcccaagggtcgatacttatttgtgtggcttactcttattttccttccttgttgttatctgacatttctaccctaaggtatgaaaaatcatatgctagctccactgctcaggcaacattaatacttactatttgagaatctgattttccaagtattgatgaacagtagtacaaataaatcagtggacaaatttaattatatcttcgatttccttaaattctcacctcttcctcagttccagttagagagcaagacttgcttaggcatcttgctccaggaggtagacttttatgttaaaagtcatgcttcctttcaagaattttatttgtgttcaagttttgggtatggcgctaagatacctttaatcaagaaaagaagtaccgggaagtcactgctgttcctgccaacagctagcatctcctgtagagttggcattagagataggaagagaatacactctgtttccaagttgtgggatagcaatgaaagataactgtaaaaagataagaggcagttatgttgggaaaatggattaaatgttttctttttcatgtactagttgtttgtgagtactttggatttttataaattttactgggtaaacagtagcctgttgattttgacagtgttgaaactaagagaaaagattgaaaaaaataattgtttcttaaacataggttgtagctggggaaaatgcagaagtaaaatgtggataaatacagatatttttctttgaacaagtaaaatgaatgtatcaatctgaaatctggatttgccttgagtaacaggagaaataagacaggatgcaataattgaagaggagaggcaagtcaggatgcaataactgaaggtaaaagataagacaggatggaataactgaacaggagggataagacaggatataataattgaatgggagagataagacaagatacagggattggagaggagagagaagaaaggatgtgataaatgaaaaagacaagacaggatgtaataaatgacagggagagatcagacaggtacaacaaatgagagagaaagagagagaagacaggatgcaataaatggatatgagaggtgagacaggatgcagtacatgagcaggtgagataagacaggttacaaaaatgagtggaagagacaagatggaataactcaatgcgaaaggtaacatgacacaataaatgaaaaagagagataagacaggatacagtaagtgaactggagtgataagacaggatgcatgtagtaaatgagcaggaaagataagacaggatgaaataactaaataggaaagataagacaagcaggagtaactggtcagaagagataagacaggatgcagtaagtgaaatggaaagataagataggatgcaataaaagggcaggagaaataagaaagagtggaatatctggattggaaagttaagacaggatgcaataactaagcaggagacataagactggatgcaataactgaacaggacagataatcaggatggagtaaatcaataggagatgtaagataggaagtaataactgaaagggggaaaatattagcttattacagacagattctccttcctactagggaatgctttctgaagctggtaacattgaaggatgagtagggtggacttgcaaagaggaggaaaaagcattacaacaggagaaagaagaatatgactgtgatattaaaatatgggaaaggcagcacttcagtctacctgggtatcatagaatttataaaagtgaatactttgatgcctacagaaagcatgaaagttgggtaaaaattggagacattcatttacttatactttcaaaatacaagtattgagcataaactgttcaaggcacaatcccaagtggaaggatacaagaatgaacaagtaagacccccaatttacactcatgtagcttgtattttaatcagagagaaagacattattatagttattataagtaataaatgatgatatcatataacagggacatcttaactgttctggagggactaggaagtgaagagtatcacaaggcgaagcttccaaggtgcgaaaggacttctttagggttttggcctttatgctaagagcaaagggatggttttaagctacagagtgttgtgatcagcctattatttttaaaaagctctctctgcctgcagtttagaatagatttgtgaagtaagaataggtatgtggaagaccaggcagtagatgatagtagtttggacaaggaagatgacagtaaagataaagagaaatcgatggtcttgaaagatgtttaggagtagtaaaaaaaagttaatgattgattggatatgggggaatgaaggacatgtagatttcaaggctgattcctagcttttagcttgagccaactatgtagataatgttgccatccactatgatagagtggtatgggaacaaaagcaagttttaaagagaggagggtaaggtcatgaattcgtcttggctgtgttgcgtttgaagtgcctattagtagtgagattgagtctgactctcaagggagagaattaggcttgggatataaagttggaattcataggttatgaatggcaatagaagctaagggagtagatgaaatcatttagggagaaaatgttaagtgagaagagatgggggtctaagatgggaccttgagtcatatcacattgagctcacataaacacttgaaggttatagagaggaagttgaactgacaaaggagagagaaggagagactagatagccaaagctctgaagaaaaccagggcaggaaaaagtcttggaaatcaggtgaagagatcaatttcagaaagaaagaattgtcagatgtataaaatgtaattggaaggttatgttagttaaggcttgagaagtgtccatttgatttagcaacaaatgaatcactgaatcatagtgagatccatttcagtgagggagcaaaaactattttgaaatgaattaaagagtaggtgggaggtgaggaaatgaaaacagcgtgtatacacaattcttttcagacactttgttgtaaagttgagaagtgagacaaaatctggagaaagaaataggatcaagagagagtttaagaaaggatccagtacagtgggagatattggggatgaaaatgaaagagaagtagtctattatataaatcttccaaaaaagaaaggagggagggagggagatttagtgccaagcagagaagatggccttaaattggaggagacacctcctcactggaaggaggaagatggtttgacagtgtaaatgtgagtccatttccttttgagcaagatggcttggcagtataaacgtgagcccatttccttttggtgacatctatttttttctttttttaatttaaaatatttaattgacaaattgtatattttcaaggtgtacagcttgatgatttgctatacatatacattgtgtaatgattacatcaattaaattaacacatccatcactacccatgctgtatgttagatctccagcatttagttctcttatatgtgaaattttttaccctttaaccaacatctttttgattccccccactctcagcccctggcaaccactgttttactctctgcttctgtgagttcaactttttggattccaccatataaatgagatcatgtggtatttggttttctgagactggcttatttcacttagcataatgtccttatggttcatccatgtcattgtaaatggcaagattatcttcttttatatggttgaataacatttgtgtgtgtatgtgtgtgtgttacattttctttatccactcacccattgatagacacttaggttgtttccatatcttggctgttgtgaataattctgcagtaaatatgggagtgctggtgtctctttaagatactgatttaatctcctttgtacgctcagaagtggaattgctgttttatttttaattctttaaaggacctcaatactgttttccaaaatggctataccaattcgcatgcccaggaacaatatacaagggttccctcttctctatagccttgccaaatacttactatctcttctctttttgataatggccatcctaacacacatgaagtgacattgtggttttgatttgaatttttctgattagagatattgagcaccttttcatatattggttggccatttgtatgtcttcttttaagaaatttaggtcctttgcccatttttaaatagggttatttgttttcttgtttttgagtagtttgagttccttttacattttggatattagctccctatccaatttatgatttgtaaacattttatccctgtattagtccattcttacactcctaataaagacatacccgagactgggtaagttgtaaaggaaaacggtttaattgactcagttcagcatggctggcaaggcctcaggaaacttacaatcatggcagaaggggaagcaaacatgttcttctttgcgtggtggcagcaaggagaagtgctgagcaaaagggggaaaagccccttataaaaccatcagatctcatgagaactcactcactatcacaagaacagcatagggtaaccacccttatgattaaattacttctcgccaggtttctcccatgacatgtggggattatgggaactacaattcaagatgagatttgggtggggacacagccaaaccatgtcattctgttcctggcccctcccaaatctcatgtcctcacatttcaaaccaaaatcatgcccttccaacagtcccccaaagtcttaacttattccagcattaactccaaagtccaagtccaaagtctcatctgagacaaggcagctcccttctgccgatgagcgtgtaaaatcaaaagcaagttagttacttccttgatacaatggaggtacatgaattgggtaagtatatctgttccaaataggataaatcggccaaaaaaagggggctactggtcccatgcaagtctgaaatccaatagggcaggaattaaatcttaaagctttgaaataatctcttttgactccatgtctcacagatataagtgagacttatatcaggtcacgctgatataagtggtaggcccccatggctttaggcagctttgcccccatggctttgcaggatacagcctgccacctggctgcattcatggcttggcattgagtgtctgcagcttttccaggggcatggtgcaagctgttggtggatctaccattctggggtctggaggacaatggccctcttctcacagctccactaggcagtgccccagtgggaactctgtgtgtgggctctgcacccccatttcctttccatgctgtcctagtagaggttctctatgagggctctgcccctgcagcaaacttctgcctggacacccaggcatttccatacatcttctgaaatccaggcagaggttccccaatttcaattcttgacttctgtgcacttgcaagcctgacaccatgagtcagctgccaagacttggggcttgcatcctctgaagcaatggccaagctgtaccttggccctgttccctgtttagccatggctggagctgaagcagctggaatgcagtgcaccatgtcctaaggctgcatagagcaggggggcctgagcccaccccacgaaaccattttttccctcctaggcctccaggcctgtgatgggaggagctgctgtgaaggtctctgaccttccatggagacattttccccaatgtcttagtgattaacatttggcttcttattaattttgcaaatttctgcagccagcttgagtttctctccagaaaatggagttttctttactattgcatcatcaggttgcaaattttccaaacttttatgctctgcttctgcttgaatgctttgctgcttaaaaatttcttccaccagataccctaagtcatctctctcaagttcaaagttccacagatctctaaggcagggtcaaaatgccactagtctctttccatagcaagagtcacctttaatccagttcccaacaagtttctcatctccatctgagaccacctcagcctggacttcattgtccatatcactatcagcattttagtcaaagccattcaacaagtctctaggaagttccaaacttctcacatcttcctgtcttctgagccctccaagtctctaggaagttccaaactttcccacattttcctgtcttgttctgagccctccaaactgttccaacctctgcctgttaccgaattccaaagttgctttcacatttttcgacatccttacagcagcacccgactctctgtggtaccaatttactgtattagtcaattcttacactgctaataaagacatacctgagactgggtgatttataaaggaaagaggtttaattgactcacagttcagcatggctggggagacctcaggaaacttacagtcatggctgaaggggaagcaaacacgtgcttcttcacatgctagcagcaagaagtgccaagcaaaaggtggaaaatttgcttatgaaaccatcagatctcaggagaactcactatcatgagaacagcatgaaggtaactgcccctgtgattcagtcacctcccactgggtgccttccatgacgtgtggggattatgggaactacaatgcaagatgagatttgggtggggacacagtcaaaccgtatcactcccaatctgtgggttggttcttcacgccattaactttcctttgctgtacagaaaagccttttaacttgatgcagtctcatttgtttatttttgcttttgttttccatgctcttggggtcataccaaagaaatcactgcccataccattgtcatggagattttttccccatgttttcttctagtagttttacagcttcaggtattatgtttaagtctttattccattttgagttagttcttctataaatgatgagataagggtctatttcactcttatgcatgtggatactcaatttttccaccactattgaagagactatcctttccctattggtattcttggcatctttgtcaaaaatcaattgactatagatgtgcaagtttatttctgggctttctattcttattccattggtcagtgcatctgttttcatgcaactaccatgctattttgattactatagtgtatttgttcattttcacactgctataaagaactacctggaactgggcaatttatgaagaaaagaggtttaattgactcagctccataggcttaacaagaagcatggctgtgaggcctcaggaaacttacaatcatggcagaaggcaaaggggaagcaaggacctttttcacacagtggtaggagggagacagagagacagagagagagagaaagtgccacacacttttaagccatcatcagatctcatgagaactcacttattatcacaagaacagcaaaggggaaatccacccccatgatccaacacacttttaaactatcagatatcatgagaactcactcactatcatgagaacagcaaagtggaaatccgcccccatgatccagtcacctcccaccagctccctcctccaatttgacatgagatttgggcagggacacaaatccaaaccatatcatataactttgtaatgtattttgaaatgtggtagtgtgatgccttcaacgttgttcattttgatcaaaattgctgtgactatttggggtcttttgtgcttccatacaaattttaggatttttttttctatttctataaagaataacattggaatttttataggaattgcatcgactctgtagatcactttgggtagtatggacattttaacaaaatttattcttccaatctatgaacataagatatcattccatctatttgtgtcatcttcaatttctttcattaatgttttatggtttttggtaaacacatatttcactttgttggttaaatttactcctgtattagtctgttctcactctgctataaagaaatacctgagactgggtaatttacaaagaaaagaggtttaattggcttatactttcacaggctgtacaggaagtatagtggcttcttctgaggaggcctcaggaaatttacaatcatggcagaaggtgatggggaagcaggagcgtcttacatggctggagcaagaggaagagagaggtggggaggtgctacacatttttaaatgaccagatattgtgagaactctattacaaaacatgaccaaggggatagtgcttaaccatttatgaaggatccacccctcccccaccaggccccacctctgacactggggtattacaattgaacatgagatctgggtggggacacagattgaaacctatcaggggaaccagcccccgataagtcaacataggttcttttctattttctctaagtgtcggctggtctgagaaataaagggaaagagtatgagagagaaattttaaagctgggtgtctgggggagacatcacatgttggcagattccgtgatgccccctgagccataaaaccagcaagtttttattagcaattttcaaaggggagggagtgtacgaatagggtgtgggtcacagagatcatatgctttaagggcaacaaaagatcacaaggcagaaggtcagggtgagatcacaaggtcagggggaaactagaatcactaatgaacttccacatcccactgtgtacgcattgtcattgatagacatcttaacagggttcaagagcagaggaccgatctgactagaatttgccaggctggaatttcctaatcctagcaagcctgggggtgctgcaggagactagggcgtgtttcatccctgtctacatctgcataaggcagacactcccagggcagccattttagaggccccaccctgggaatgcattcttttcccagggctgttaattattaatattccttactgggaaaagaattcagcgatatttctctgacccgtttttggtaataagagaaatatggctctgtcctgcccagcccacaggcagccagactttaaggttatctcccttcttccctgaaaatcgctgttaatcctgttcttaaggtgcccagatttcatattgttcaaacacacatgctctacaaacaatttgtgcagttaatgcaatcatcacagggtcctgaggtgacatacatcctcagtttacaaagatgatgggattaagagattaaagtaaagacaggcataggaaatcacaagagtattgattggcgaagtgataaatgtccatgaaatcatcacaatttatgttcagagattgcagtaaagacaggtgtaagaagttataaaagtattaatttggggaactaataaatgtccatgaaatcttcacaatttatgttctgccatggcttcagccggtccctccatttggggtccctgacttcccacaacagaaaccatattaacttctatgtgtatttgtttttagatgctattgtaaatgggattatttcctaatttttaaaagatagttgtttgtgtacagaatcagtggtatacactgctgatttttgtatgttaattttgtatcttgcaacttagcagaatttctttgctagttctaacagttttttggtggtatccttagggctttttatatataagattatgtcatcagcaaacagagacaatttcactttttccttttttatttagatggctttttatttttttttacttgcataattgttctggctaggacttccagcactatgttgaaaagaagtagtgagagtgggtaaccttatctcactcttgatcttagagcaaaaaccttcaacttttcaccattgagtatgttagctgtggggttgtcatatatggtcttaattgtgttgaagaacattccttctatctatatctatgtcattgtttttattatgaaagaattttgaattatattaaatgctttttctgcatgactgagatgataatatgattttaatccatccttctttctgttaatgtagtatgctacatttattgatatgtatatattgaaccatccttgaattataggaataaatctcagttgatcatggcatatgatccttttaatgtgttgttgaattcagtttgctagtattttcttgaggatttttgtatctgtgttcatcagggatattgacctgtgattctattttcttatagtgttcatatctggctttggtatgagagtacggctggtttcaaacaaatgagattggaaatgttctcttctcttcattcttttggaagagtttgagaattattgccattaattgtttcattgcttggtagaattcacttgtgaagccatctggtcatgggctattctttgttgggactttttgattactgattcattttccttgctcattattggtctgttcggactttttatttatgcttcagtcttggtaggttgtctatttctaggaatttatctatttcttctaggttattcaatgtattgactatagctgttcataatagtccctatgatcctttatatttctgtaatatgagttgtaatgtttctttttcatttataattttatgtatctgagtcctctttttttcttggttagtttagctgaagaattgccaatgttttttatcttttgacaaaaccaagtcatagttttgttgaccttttctactctctttatagtctctgattcattatttctgccctaatctttatttctttctcattccttcttctgactttgaccttagtttatttttttctgatttcttggggtgtgaagttaggtagtttatttgaagtctttttttttcttaatgttggtatttatcactataaatttccctcttataactgctttttcagcatcccataaatttgagtatgttgtattttcatttttatttgtctcaagatatttttttatttccctctttgatttcttttttgatccattggttgttcaggagtgtgttgtttaactttcacatatttgtgaatttttcaaaatgttcttgttatttctttttagtattataccattgtggttagaaataatacttgatcttaatatttttaaacttgttaagacttgttttgtggccaaatatgtaacctgtcctggaaaatgttcaggtgcatttaagaagaatatatattctgttgttttgggatggaatggtccatatatgtctgttagacccatttggtctatattgttattaagtctgcagtttcccttctgattttctgtctggttggtctatccattgttaaaagtgggatattgaagtcttctactattatattgctgtctatttcttcccttagttttgttaatatttactttatatttttaggtgctctaatgttgggtgcatatataattacaattattatatcctcttaatggattgattcttttatcattacatagtgacctactttgtttcatgacagaatttgactgaaattaatataagtgtagccactcatgttattttttggttaccatttgcatggaataactgtctatctctactttctgtctacctatgtccttcagactaaagtgagtctcttgtagacagcatatttttggatcttgtcttttaaatccattcagccactctgtttctttcgattggagaatttagtctatttacattgtaagtaattattgaaaggacttactattgccttttaattggtaattgttttctgattgttttgtagatcttttgtttccttcttctttcttgctgtctttgtgattttttgggttttcttagtggtacatgttgatttttttctatttatcttttgtgcatctaccataggggttatttttgtggttaacatggggcttacataaccttctctttttagtggataacaactttaatcatatacaaaaactctacacttttatttttctccatgttttatgccacagtttacatatttttatgttgtgtataaaatttatatatattagtttatattaaattattatagctatagttttaaaatctttttgtattttagcttttatactagaattggaagtgaaatacacagcactattacaatattagagtattctgattttgactgtgtatttaactttccctatgagttttatactttcatatgttttctcttttccttccttccttcctctctcctattttctttctttctttttcttttcttttctttctttctttctctctctctcttccttcttttcttttctttctttccttctcttctctttctttctttctttctttctttctttctttctttctttctttcatctttctttctttcttgtcttgctctgctgcctaggctggagtgcagtggcatgatctcagctcactgtaacctctgcctcctgggttcaagcgattctcctgcctgagggagaatcaagcaattctgctgagtagctgggactataggcacaaaatggggtttcaacttgttggctaggctggtctcaaactcctggcctcaattgatccacttgccttggcctcctaaaatgctgagattaccagcgtgaaccaccatctccgacctcatatgttttcatgtcgtacttagcattctttcatttcaatctgaagaattccctttagcattttttgttaggcaggtcttgtagtggtgagctctctgagctcttgtttgtctgggaatgtctttattgctttttcatttctgaaggatacctttgccaagtacagtatttttgcttgtagtgttttatttcagcactttgaatatgtcatcccactcctttctgacttgcagggtttctgttgagaagtccactgttagctttatgtaggttcccttgtatgtgatgagctgcttttttcttgcttctttcaaaattttccatctttgactttcacaattttattacaatatcttggaatattctttttttgggttaatttgtcttgtgattctatgagtttcatggatctggatatgtatatccttttcaagatttgggaatttttagctagtatttctttaaataagctttttgtccctttttctctcttctccttctgacactgtcataatttatatatttgtatgcttgatggtgtccatagtcctttatgctttttctttttccttttttgatcctctaattgactaatttctgatgacagatctttgaattcactaattctttcttttgcatgattgagtcagttgttgaaactttttattgaatttttctatcttttatagtattattcagctccaggatttctgggggttttttttgtctttactatggtttctatttctttgttaaacttttcactttgttcatgcattgttttcctaattttgtttagttgtctattttggttttcttgcttctcattgagcttctttaagattattatttgaattctttttcatgcagtttatagatctccatttctttggggttggttattggagctttattagtttcatttggtggtgtcatgtttacatgatcctttgttatctgtgtagtcctgcattggtgtctgagtttattcaggtttagttctttccactcaaatgtaatagggtatagagaatggcagagaaatttagggagttgtcaagagaatggctataaagataggttatgaattttccttaaatgggaagagaaataaagataaaaaagaggctgatttagttaagaagtaaagagaccaaatattcaggtgctaatggggttgaagaaatgttatgtcgggaatagtccaacaagtaaggtagaaaatcagaaaggagatgctttatgtagttagtttggagaatggagattgggcagttttgtgatattttctagagtgagatgagactatggaagaggggtagtggcagagaaggtagtcgaggtggaagttagtatagtctatgaatcatccatgtggacattgaaatctcccaggaatgtggtaaggattgggtggaaaggaaaagcaggtgccaaaatctttgatgaatgaaaagttagtaaatgaccacagtaggtatgtggaatagctaaataatatgaacttcaaagaaggaagagtcttctataggaggataagcaacaaggggaattgagaggggtattatttctagcttaggactaaggagttcttgaaccatgagagaataatggccacctcttaagaagacttacagggaaggatttttatcagggggaggcagatttcaatttaaaccaagaagtgggttgaggggaatattccaaagagcataagagatctcatgttttccaggagggtcaatattaagtgagggtacagctaagatttgctaccataatcagatccttccatcttttcctgactctttgcttaacatatgcccatttatttatcgtttttctcattgtgaataaccaaaggaaatggcaatgtgtaattcgaatattaggatataaactttgggagaaaactggatattaaagtctattaaaattattttaaagtccaacccaagatatagcattacaatagcgagttgtttccagtaatcaatagaaaataagtggaggtgcataatgacccagagagaatcttccccaggaactgaggtccagagatgtatgactggatattttaacctactggatcataagattagaaacatttaattgtatattgttccttttaagtagactggttactattctccaagacctttgttatgtctttaatggatgagatacttgctattttacttgctcatgttgtatgaaaaattgacataggtggaaggcccatgctaccctcagtacaggtaaacctgtagtagtaataccatggttacaacaatgatgacaataattgccatagcactgtagaaaggcacaatacagacatctaaatataaagtaatgagagtagggtagtgactttaaaaaatatgaagtgacctattgctatcaatatacttacaaggaagaaatccttgtaaaatacagaagtagccaaagagatagaagacataatagaaacatatttcttaacaatttttaactcttggttaccatttgattgtgataaccaaggagggggcacaatccagcaaactaaacatctgtagataacaaaaaactaaaaatctcttgtatttacaaagggccagaaaacctacagaacatgcttccctctcaagggattctaatcccaattaaatggttcatatagttatagtgaagagtttgcattttaaatatttttgacagtactttaatctaatttttaaatttttctcattttatgtaaataacatgttttaatttatttttactcagccttaggatgaaggatttcctatcattttatgaagaaaatcaataatttcattgacagaaactagctatgttttgtcaagtaaggtttaccaaatattctatgttttatggcttgtggtatacctttaggttcacctacttcctatagggacgcatatggtggcacttaccgggtctgcctagctgctctctatcatgtcttaatattggtgactaagcacttttctgtaaaatgtaaccaaaatgttgagatgtttttcttttctcagtacttctaaagacaaattgacatagaggggaaaaagagactcacaagtttttggcagataaattttttatctccaaaagtcataagtacaaaatggagtgacaaagattttcacattttgtgcatttctttggtcacctttcagcagttagataaattactcttcacttatgatttttgtgtgaacctccctgctcttcaccctcagcttgttgacctgggactcagcaatgtcagcccgttcctcggcctcctccagctcgtgctggatcctgcggaatttggagaggttgacgttggattgttcctcctgtgaatggaaatccatttatgagggaagaaagttcagaatttttccattcttaggtcagtggatcttgaatttcctttttacttaaaaatgattcactctagcagatattttaagaaacctagagaaatgctcttgaatttttatttttttttatttttgcattagcttcttgaactcatagataacaaggaaggacaggtgacctttgtatctgaacttttagaacagcagaacatcctagagctactactaaatatgccaggtgtccagctttgtttttttttttgtttgtttgtttgtttttttcagaatcctgagaatggaaccaaaccttttaagagtgcaagtatgcaatctataccaaaccaaaccattaagcttgaatataagttattgccatgtgagtataaattattgccacttaagtttagaaattaagcaagaagtttgtttcctaaaatagtctgagctgtctctgattatacttaaatatatagcagagaatttgagcaggtcagttctagtttagtctctggtaatcattcttatttaaaagtctcagtaagaacctccaaaatgtggcattcaaatttagaacagacataaagcttagaatcattaaatagtatagcttgagaaaaaacctcagcttttcctcttacagatgaggaaagtaggaactggagaaagattaagcaatttgtccgaggtatggacagtagcgtgtgtgtgtgtccgtgcacacaagtgtgtttgttttctctccctccctcattcccctccattcccatctttctctctctcttaccttagatgtcaggggtaaaataaaaaccatcaatgaacagaggaactcatttgtgatatgtaactatgaatatttatatgtaggaagttgaaactatttgattattaatccagatgaatcatgggatacggaaatgagataaagtggagtgttaagaatctactgatttgaacataaccaagaccttctgagtttcagaatcttatatttaactatttacttgacatgttcacttgtgtatatatggtattatgtatctaaaacagaattcctgtttctttcttgccctgcaattctgttcttccctttgttccccacttaagtgttacatcatccacttggttactcaaaccataaacttgataaattactcttaattgcctttctttcatctcccaagtgcaacctattagcaatcttgtagtttctacctccaaaatatgtcctgaatttctccacttctctctgctccactctcttatccaagccacagaaccgacctgaaaagcttcctaacatgtctctctgcacccacttgtgttacccagtaaccgattctttacatagtatcccaaatgctctttttaaaaaatatagatcaggtagtgactgacccacattaaaaccctccctggcttcccagtaccttattgttcttaccatggcctggaagaccctatgagctgcctcctgcctggctctccagtcccagttgtggtgctttcctcctttttttgtctgcttcttgagccagactctttcccactcaaaagctttgcatttgctcttccccatctctagaacatcttctgctggcttgtcaggtggttggttttacctcagccttggacctccatgtagccatttgttttcttttgatccttcctcattttactcatcttttcttttgtcactttaactaaactggcctggtcatgtctgagaaaaatcaccccaaggggttgtgaactcaccgcttcttcagcttgtctcttgtaggatttcacctttgcttgcagtttgtccaccaggtcctggagcctgagaatattcttgcggtcttcctcagtctgaaataatgttttcaagagtaagtttcttgaaagtacaaatattacattttgtcatacatatgacttttaatcccatgtggactaaagtgaaaacctagacaggccattttccttacttggtaagtgagttccttcacttttctctcatgtttgcgtagacccttgacagcttcaacattgcgcttctgttcactttcaacttcaccttcaagttcacgaacctacaagaagatggacattttaaggacattcatttgacgaatttctacttcttcacatgacccacatacttcttctactctgctttatatgtagtttttaatgccctagttcagttttccttattatgagcttttgggcatgagggaatagctctccctcatctcagtatgccccacatcatctagcagtgctaggtattcagaatcgtgtgttggattggaatgagatagaaatacatgctgattaggagacccaccctggcctccagtttctggatctgcttcttcccacccttcagggccagctgctcagcctcatccagacgatgctgcaggtccttcaccgtctgttccaggttcttcttcatccgctccagatgggcgctggtgtcctgttccttcttcagctcctcagccatcatggcagcctaattagcagtaaaacagaatgggttaagacagctaagacagcacattaagatttaagtttgaccaccactgtgttacccttcactcacatcagtgatggccttcttggccttctcttctgcattgcgggcttcctggatgatgtcttccatctctccctggatttgggaaatgtctgtctccagcttcttcttggtgttgatcaggctggtgttctgtttaaaatgtgaaatttagaaatattaggcacatgagagaaaaattaggaaacctcatgttctaatgaaccataaactaattaactaaatgaattcattaatattcctccttgtttcataaattatctgagt[138 bp omitted]ctccactaaaaatacaaaaaattagccgggcgtggtggcgggcgcctgtagtcccaggtactccggaggctgaggcaggagaatggcgtgagcccgggaggtggagcttgcagcgagccgaggttgcgccactgcactccagcctgagcgacagagcgagactccgtctcaaaaaaaaaaaaaaaatcaactatggatgttatagttcagataagaatatagataatcaaaaaaataaaatattttaaactttatccttcatgaaatcttataaatagatttcttaatagtaccacgatttcagcaagaatgtcattttcatacccttgtatttgttgctattctattattacatgcacctgggtgtgcaggagctgaacacgctcactggcatccaggagctcctgttctgcgattttcctgctcctctctgtctgttccagagtggcccgcagctcctcgatctcagcctgcagcaggttggctctgcgctccaccatagccagctgttccttcaggtcctcctggctccggagagcatcatccaggtggagctgggtatcctgtggaacaaaccgtcattgagacaccatgtattcagggttgcaggcaccccaattgtcctgggatcatctgttggacatatttaccttgaggatggcttgggtgttcctatagttcctcagggcctcagcagccatgcggttggcatggttcagctggatttccatttcattgaggtctccctccatcttcttcttgagcctaatggcatcattcctgctcctgatctcagcatccagtgtgctctgcatggactccacgattctaatgtggtttctcttcatctggtcaatttcctcatctttttcagcaattttcctatcaacctcagacttgacttggttcaactcaagctggatgcgcaggatctttccctcttcatgttcaagagatgccttaatgacagcaagaggtgacattagtagagtaatggaagtgtgtagtattctagagataagaatgatttatcattcatgaaaccttatttataaatagatttctaagtagtagtaagatttaaacaagagtgtcattttcatgcctttgcattttcttgctattctctaacacacacactgtctgcctttgtgctgccatcatacatttttattttgttgttttagacatttctacaaattattgaatgttattgttgattttatatgcttttatctccctaggtagattgtgcccttgaaagcagggcctttaactgattcatctttgtttgctcagtgtgtagcacagttcctgacatatggttatgttggttgtatgcatgatcagttctccattctcatccctagttcatggagcaaaaattatttttcgtttctcttgattcaccattccttacatttaatagaccccaattcctcttctaattgttttagagtatgcaataaaatgcttacctctgcctcctctaaggcagcctgaagttcagacttttcttgctcaacttgcttctttattttttccagttcatggatgcgctttcctccttctgcaatctgttcagtgagatcagaaatctcctctgttggtgaacaaaaaatatagaaatttgtttatagttggaaaagattctttcaaatcttttattgttaaagaaaaggtaaaatgttctcacgttgcaaattcttattttcccgtttcaaggtttcaagttggtctaaagattcctcataagcattcttaatcttaaatagttctgtgctgagtgagcgggattccttttgagaagcttcaagttcagcatgagtttcttcacacttctgtttccattctgccaggatctgaaggtcaaggaatggacaagaaatttagtggacaaaatttgatgagataaaaaccatctattctagcacctctcagagttgaggtgttctgggactgaaaaaaaattatgaatgagaagaatagaaaccataggagcacttcccctctccacagacagctgctgatgggttaagagctactgagaacagccctcagatggtttgaattgggcacactgaaggtagcaggctattgttaattctgtgttgaaagttgaagcaaaaactggagagaataccttatcaaagttcctttgctttttgtccagggcggcacaggcagcatttgtcctctcaacatcaatcatgaggtcctcaacttcattctggagcctctgcttcgtcttctcaagggaagcacatttggcattcacagcttctacatgttcctcagcatcctgcagacgctgagccagcttcttcctatgaaatatgggcaataaaagtgaatggctgtcaactgaattgggtgtttcaaagtgggtacaagagagtgaattccacaatcagacttctttaatactttgcttctcaagcttgttttgtaggtccagttctatattaactcattcccattatcctaccaccaaataccaaaaacaaccccagttttggtattgccatacttcatagagtggctttaaggccatccatgacaagcatgagctaacactttacccttccaggtagctggtttattcctcttctgtagaatattaatatctaccttgaattactggtttgtttttctgtgtctccacataattttaatccccagagggagagtctgtactgtactaatctttgtattcttgtaggctgtccaacatattaagggctcaaatgttggataaattgaattcaaatgaaatatacttgattttgtctgtctaattgtatcccttatttgtgctagtttttaattaatccattaataataaagaagctttcccacatcaatatacattttgcatcgagaactcctctcagaatctcttctaaggcatctaccaaaacattaattccaacaatatggctgtatatggtcccagaatgttttttccctagtttttcatatgttttgggagcaaggaaacttatagttccattttaactaagtctggaacatacttggcctcctccagctcctctgtgcgctggatggcatctgtctcatatttggtcctccactgggcaacctcactgttggccttggacattgctctctgtagctcggccttggcttcctgctcctcctcatactgttcccgcagcaggtcacagtcatggcgggaggactgcagggcatgtgccagggcactcttggcctgagaacatagagattgatgacttaattttatatatttaaagtgatgtttgattcctgatctcctataggccaccagaagaaagtctgtaaaagtaagcgaaaaacaaataacaagaacaataatgacaagaatgacaagtggagcttacctttatctcctcttcaagttgccttttcagttcctcaatctgttgtgtaaaggcttgtttgcccctcgagagctgtgaaactagtgtgtccttttcatctagctggcgtgaatattcacctgtaaaagaccaagtccagaaaactcaaccttactttggaaattaaaactctaaaataaaaacttgagcagggaaagggagccaagtttgaaacttgatggagggcatgggtgacaacaaaccaccaacatccgctttaaccttgataagcagatccatgtaaaaattagaagcatggagaaatttgaggcagattacatgcttgtgaacagcacaaaagatttcaagagatatttacgattatttgatcgtagtcaaaattgatgaagaaacatgaaaaaaatgtaaatcaagccaacaaaatattctagtactttttattttatgtaaggcagtagtgttgtctaatttgccttccattgaaagttggttgaaacaaaggatttatactgtggaaaataagagactttgggcaatgtcttctgtaagtagaaatgatagtcaagagaaattctggaaagatttttatattaagaaatgattaagtggtctcccatccccagaatgaattggtttctggataagtactttccaaactaaatggcatttacacatgtcttcaattttttaagcaccataatgcagaaaatgcactacattatgttagaaagatagtaaaacttttccacaccatttttatactagttatcttgaactttatctctggcatttaataagaattataataaatatttattctgaactttgttatagaaagaatagtatttgaataccaaaagtgtagagtgattttccaacactttaacctgcctattactttaatagcctaaattacccataaaacaatttccattttgttacctctacctggggagatacaactctggtagaaagttggacacgtcagtaggagggggaataaatgcagagactttccaatttctctaatcaaaaatctacaaatcttacttgaatgcttctcagctgggttgtggtcttgaatatttccctacttaaccgtgttagttaccagtaattggcaagacttcaggaaaaagactggagtaaacattcttggacaagttgcttcatcactaccataatccactgtctttaaaatggggatagtattacacagactaatgaggaaaataaagtaacacatagcttgcgaaagcattttgaaaagtgaaaagaggtactgtaaggatgcactttgtttttgataactttttgattaaagccaagtctcccttaaagtcttcaaaaatagaagggcctgattctatttatctctctctctctctttatatatatatatatatgtatgtatggatatatatacaaatatatatatggatatatatgtttcatatatatacacatatatttctctcgtatatatatgaaagaaagcaacctcatgccagtggtcaataatgtgttcatattagtggggatctcccagggaggtagtatatgacctcaagtaaataaatgcagagtttttcagtggattacacatgcagggtgaatttgtcattcaaggtcagtactggtacatggcccacctgattctgtttgcaggcgcgctctctgtgctgtgaggtcattgatcagccgctgctgctcctcttccttggtcttaatttcactcagttgatcttctagagcgcggcacatcttttcaaggtttccctgcattcaaaaagtggtagaaggcatctcaagtaagtagttggaccaaagaaagtttcagtaatctaaacattccatatgagctgcagtactcatttattttgagaagaaactatctttacaaacaaaaccagcaaaggtcttagatagtgaatggaaagactaataagatacatagtccaagcatacagccactgaattacttgttaatctaactactttactaagttgtactatacgtgatatgagaaaaagggtgcctgatttagttcatgagacgtttttgagatacaaatcatatttgtgctaaagggaaaaacaaaaaaccaaataatcaatgtgaagtgttgattgtaccttggctttggagacagtctccatgttactagcaaggtcatcgatctccatcttcatctcactcttctccttctccagcttctgcttcactcgctgcaggttgtcaatctgctccccaagctcggccacactatctgcatgcttcttcctcagggtggccgccgtggcttcatgctgtagggtggcctcctccaggtccctgcgcattttctggaactcagcctcccgcttcttgttcatctcaatctgggctgaggtggccccaccggcttcttccagcctctcgctgatctcctccagctcccgggagagatcagagcgctgcttctctgctttggcccgggaggcccgctctgcctcgatttcctcctccagctcctcaatgcgggcctgggaatggtgaaaaatattaatacgaactcaacttcttggtgtcagtaacttttcgatgttaaattagcctggcgaaaatcatttaacgtacttgtaactccttgattttcttctgcagctgcataccaagggcttgttcatcttcaatcttgctttgcagaccgctcatttcaaactctttcctattagaaaagccctttatgtcagtctcagaaatattaagagtaatttccccacaaaactgttgacctaaaactgcttactttttaagcttttcatcaagttgttgtttgtcattttctatatccattgtggattcttgagccaattttaggtctccctctagttttctctttgctctttctagatccatccggattttcttttcttgttccaaagatccttcaagctaaaagttaataatccatgaatatggttcttagaatggtagcaccttttgtcccagatgaaatttttaaacattatatctatgcagcaaactatttttctatgaattaggcagatttgtcccattgattccattctccttggtatttacctagtcgaaaaagtcatcgtttaaaaggtaaaatgtgcctctttgtcacgttgttacaataagttactagtgagacattatgccttctgcatctccccactggaatccaatacttttccagctgggatggacaccatgctaatacttccaaaccatgaacttttttaacgcctcccttactcaggcattttcagtgggttctctattagatatcagatcatgtttaaagccaaatttatcttccacattcctaattctgagtgtcctttgtttctgtgagagaaaaccttattgatcattacaacttctttgctgctgctatgctgccttcttagaacaccctccctcttctttctttttgcacatagccccttgtctttcaagcccagcgaaagacctgttttgcttgtatagcttttctttgtgaacacattaaccttcctttccatcaattctttttacccgtattgtctattattcacagttaactttctttattgattttaaaaactttattgtgtgtacatcttagaccttgtaatagggatgatgttccatattcctcattcataggaggcacttgataagtactcactatatcataacgacacaaacttatgcttacttagtttgttacaaaatttaaaaaatcatttttatataatgttaggcttacatcatccacttgttgttcaagtttgattttagctttggtcagggtgttgactttgtcctcctctgcctgcaggtcatccagggtctgctggtgggcctcctggagagccttcttctccttggtcagcttagcaatggtttcatccagacccgccatctcttctgtgaggtttttcacctacaaaggtgaagaaagcagcttagttgctctaaagcacctttgttgggtggcagaacctctatacagtactgtagaatatgattgataccttgttttctgtggcatgtttctccttctcaaccttggccagtgtcagctcaaggtcatcaatgtctttcttgagttctgaacattcatcctccagtttcctcttcttggctgtcagctcagcattgatctcttcctcatcctcagctctctcagtcacctctttgattttggcttctagctggattttggttttgattagctggtcacacctttcctctgcatcagccaagctgtcagcttcctgagaagaggcaatagatattttagattttatgaaaattcctagacattttcagattttattaatattttgaaaccaaacaagtaaattgttttaagccttcaggttaatttttattagctttctaccattcagtaaatattgggcacttatgagtccggtaataaaaaaaggaacttaagtcatagttcctggtgaaattatgttacaattatatttgttataacatatataatatgttggtatataatttcgggtcagccaattttctttatttaatatttattttcaggagcattcaatatatgaaaaaccaatagacaaaaggattgggtttctagcaggttgctgggagagaagggtactatcagaaaagtgccttaacaggaagaaatgtcatccagtgacagagtagacaaagggaatggaacatgttcaaggtgatgcttagagaagtagcaagcatatttctcataagaagaaataggagttgagataaactgtgagggaaggaccatgtctctcattcaaacttacatccctgtccgggacttcacccaatatttattagtggatagttgatagaatattgttaaacagaagttttataatactatcctcaaaggagaggagtattcttggatagattatctcctgtttcttgaaggcacgatgaaccactcctcaatgtggaaaaccctgatctatacaaagtacaggaaagtcacagtaccaacctaggtatttgcaattcatcatactttagattttctaaatatgtgtcccaaacttgtaggcacaatgggactagtcaattccctttctgaattcagagaactgggatggtaacttttaatgtttctgctgttggttttggtggcagcaattgaactgtcttgttatttgtgttacaaaaatgggttagatagtggcttttgatcaaatatttctctccaagcctctggatagttactgggacattagaataagaatatcaaccctatctctcatactttgcataaaaatagacattatctgtggaaggcattgccattatccttacagaaagcattgccattattcttgccataatcctactctttcaggtactaaaagtttctaaaaataaagttgagcacaaagttgctcggggattgtagatacaaaactcagaatattgatttcaagttaatgtgttttcatcaaagtctccttcctcttcactgacaatatttttctttttcacagctcttatttgcatttttcagtagggagaatttagggagcaaagctcactttatttcctgttcacattctgctgtagaaaacaacagaggggaaggaaaaatgcttttatttttcccttcttgacatcaaagaatcctaccacagtgatttttagtaatattgtatagggaattctatagaacattctaaggagttgtggattattaaagattcataatctgtcccttatttggtagaatctagatctctccttagtgaccactgagctgaagttttagcatcagattgcaggaaatgacttcgggatactcacagcttgaacctggagttgcaagtcatttttttcttgcatcagagtaaccattttttcttccagctctttcctttttgcctcggtcttagccagctcttctttggttttctcaaattcttccttcatgttggccatctccttctctgtctctgcacttttgaggaggggtttgatcttgaaatacagcttcatccagggccagtgcttcacattcatgaaggcacggacattgtactggatgcagaagatggactctctgtcataggaacagaaatgtccaaatcagattataataagaagcagaattaaaacacctaagatgatgaggttaagtaaagaattcttattaataccttctttccaccattttctggtactccactcttgccaagaaccctctgcacatggcctgggttcgggtaatcagctgggccagcttctcatctcgcatctcctctaggagccccagaagaccagctttgaaaaagacctatgtgtgggaagaatttcagatcagaaaatttacataaagttcaaagggacaggaatagcatcaggtaggatttacagaatattaccttggtgtgaccaaatttatactgggtgtggtcaatgtcaatggaccccaggagcttctctgaagccttcttgctatcgatgaattgtccttcagggatagcacttgcatttaacaccttgtatctgtttaagccagacaaaaaaatgatatggctgttgccacagacaagaaatcttcctgtctggctatagaaacaacatagccactgggtaatctgaaataaacaagaaatcatatctacccctttatctatcctctgtttattcaaaggacttcagagttttcttatgtcaatatggagtttgttaagtgagtttatcttctcttcaattttaagaggaggtataaaggattctttcattgaaaaatgtttaaaaagtaataaaaacctcttaaaataatttacagcaaaaatgtctgacctctgtttgaagtctgcataaaggattctgcttgggaagcctttcctgcagatgcggatgccttccagcacaccgttacacctcagctgatgcaggacaagctcatgctccatggcacctaaaagaatgaatccacatgccatacttcgtggtctatcacacacacactggagcttgtctggatatcagaaatgtcttaccaggagttttagtttcattggggatgatgcaccgcacaaagtgggggtgagtgctcctcaagttggtcatcagcttattcaaattctcctgtggaaccatgcgagtttatactttaaaaaatgtactgttttctacattcatatttatagacataattattgagatctatgacagtggtttaattctaatgaatagtatccagatgaaaattttcaaagagttatctctggaatttccacattcctaatatgtccccctgttttctgttggtgtgcattagaagcatagttttctacttgctgttgaagtgactgttcgctgctgtttaatttcctagtatatgttttaaattcactatgacactctaaatatatggaaatactctacccattctttttttgcctagatacatggtctgattttactactaatcaatgccttcctctaattctcccacttttttctttgtcttttcttcttcttcttttttttttttctgagatggagtcttgctctgttgcccaggctggagtacagtggcgcaatcttggctcacggtaacctctgcctcccgggttcaaacaattctcctgccttagcctcctgagtagctgggattacaggcacatgccaccacccccagctaatttttgtatttttggtagagacggggtttcaccatgttggccaggctggtctcgaactcctgacctcaagtgatccacccgccttagcctcccaaagtgctgggattacaggcatgagccatggtgcccagtcacactcacttctttctttacctgactttcacttgtatctgtgtgtctatcaaatgtgtattccttgccatagatatagagctgtgtcctcctacttattccacagaaagtggcctttattaatgcctattctgggaattggtagaaaactgacagccatgttaccaagcgtgtaaagttttccatcttttgaaaatcctggtttttccgaatatctacagcatcagttattagagatggaatcagaaatgggattgccaaaagaaaaatagacttttctttttttccttgagatggagtcttgctctgtcacccaggctggagtacagtgacatgatctcagctcatggcaacctctgcctcctgggttcaagcgattctcatgcccagcctcctgagtagctgggattacaggtgtgcaccaccatgcctggctaatttttatatttttggtagagatggggtttcatcatgttggccaggctagtctcgaactcctggcctcaagtgatctgcctgccttggcttctcaaattgctgggattacaggcgtgagcaactgtgcttggccgtaatttttttaaaagtgctatttattatcacatctggtttcttatttccttcttttgactcaggctccaattcccaccactgttctatcttatagctttcaaaatctactcatttcggttctataccaatgtatctttaagcacctaaatcacttggaggctcccaaagcctcaagcaagtctcagctttacttaatcctatcccactggagtcttttaagggttaaatgacctcattctcaggccccagaatcgaattttgccgtctaatactgacttctgcaattcgctttcatctctcctgactcctgtgtcttctgaatagtgaggtatctcttccaaactatcccctcttccaaactatcctcaagctccctaaaactcagtcttaccactaccagctgaactatctcgttgagtcacatcagttctagaatccttgcaaggttagttttttcccccacaccatagagtacatttaatatcctaaatctaattagacagagaaaatgaagtttgtaccctgaagagagcagacacagtctggaaagaagaacccttcttcttaccacctttctttccaccgccagcctctgaggggaaaaagaaagcaatcataggacagcctttctctggttatggttttttttttttgtttttttttgttttttttgacgaagtttcactcttggttgcccaggctggagtgcagtggcgtgatctcggctcactgcaacctccacctcctgggttcaagcgattctcctgcctcagcctcccgagtagctgggattataggcacctgccaccatgcccggctaatttttgcatttttagtagagacggggttttgctatgttgaccgggctggtcttgaactcctgacctcaggcaatctacccaccttggcctcccaaaatgctgggattacaggcaccgtgtctggcctctagttatgttttatacattaggtaaaagattaattatattgataattacctgcttccgctcccgttgccccaacaaagaggagagccagagtcttcattgcagacttctggtacagccccaccacagtctcattcagggggtccttgttcttgtcaagccagccggcaatgttgtagtccacggtgccagcatagtgaatcaaagagaagtgggcctcaggcttgcctttggcaggcttgggcttctggaagttattggattttccaagatgttgttcatacagcttgttcttgaaggaggtgtctgtcgccttggggaacatgcactcctcttccaggatggagaagatgcccataggctggaagaatgaaaagaaataaatgccacttgaattctgtctgcttatagaaataacatttaacattaataattatcccatctgagtaaattcatcctttaattctacagagttaacgaaaactcgttcctttggtcagaagtcattaacttcacaaatatttattgggtgctgatcaggagccacgtgctgtatcaggctctgggatatgacagagtaagacagatgaaggctgtgctcctgtggagtttgtgtctttaccccaaagacctgagagcaatatttctccaagtgtgacttgcgaattagctgcatcagaatcacttgctcaaaatgaggattccgatgtttcatcctacacttaccagaaaatatttctaggggtgagacaagggaaacctgcaattgtaccaagtattcttggtgggtctttcgcacactggattttaaaagcctctgctttaacgtacagtagtagaaattcatactttgaatgcagtaataatgactttaggatgacaaaaaacagtaagtaaaaaatattctagtcagtgcactttttgtaaggaaagatgactttaaatgtaagactttgtattgcaaactgtgggtaagtgttgtgttctggactctatagaaaatatttaatctccttttaccagaatatctacttcagagttggcaaaataaggaattctcctcatgtttttcacaagtagaaatatttagccattgcctatatcaagattttatgattttcttttaaatactgtacagcagtatgatctgtggtctgcaaaaagcaagccaaccttctcgatgagctcgatgcaggcagccaggtccatcccaaagtcaatgaacgtccactcaatgccttccttcttgtactcctcctgctccagcacgaacatgtggtggttgaaaaactgttgcagtttctcattggtgaagttgatgcacagctgctccaggctgttgaactaaatgagttgaaaatacaaattagcattcaatttataatgaaatcttctctttgaaaggggtgtttttttagttagccaaattgccctcttaggatggtatcgttttgtcctacctatacctacacaatgaagtttttgctgctgttagcatacttgttaaaattgtctcttcaacacctgtcaacaagctctgaatgatgctttcctatgcaataaaaaaaagttgtttggagctggaggccattattcttagcaaactaacgcaggaacagaaaaccaaatactgtatgttctcacatataagtgggagctaaatgatgagaacacatggacacatagagggaaacagcacacactggggcctattggagggtggagagtgggaggagggaggggatcagaaaaaataacttatgggtactaggcttcatacgtgggcgacacagcttacctatgtcgcaaaccttcacatggacccctgaacttaaaagttttttttttaaaagttgtttggtttttatagtatttgtttttgttagtcagaggtttcttaatgattatgattatgttgtaaactagctaaatttgctagatctgagccattatggtctgtatgttgtccttaataataaaaattcaacagctaatatttggtgaacatttactctacagtagacactatgctgagtgccttgtataagttactgcatttaatcctcacagctacctttgtaggtggtatcatttgctcatttcatgggtgaggaaacactattagggaggctaagtaacttgtgtaagaccatggtagtaagggtcatggcaggaaccccaacattttgatgccagagccagtgtttgtaactactcctagaacttgagtagacctgccctgctttattattcgggacacctacatagaaacacaattgaggatgcccttgtttaagggcattatcaccatacacaaaagtcaaaggaattctatgagggggatgaatctggcaagcatatgcgaagtgccagaagccagtcacaaagaccacatattatccgattccattataagacatgtccagaacagccaaaaccagagacagaaagtagattaggggtttctgtggcctagggggaggacaaaatagaatttcctgttgggatgatgaaaatgttctgaaattgttatgatgatagcatgtacctgtgaatatactaaaaaccattgaattttatactttaaataggtgaattgtatgatatgttaattatatctcgataaagctgttacttcaaaaaaaaaaaaagaagcagctcaaaatgattgcaagtaccctgtcattagttctcttattttaaaaagtgtggattgctttttctgttcctgcttgatgacagattattcctttctttccacgttggcttggaaatgtctggaagtgcttccgtttctaaaatttcatccagtttcaatcagtccgtacacagataaaagtttagaattgggacctctaaatgagacacatccgagatactgctgtcaagtggaggactgcagtagccctatttcctaagctgtgtagcaggtattcttccttaggcagacaaatttgagtttatttacgatgccatttctatactcaatacctgggtattgcagaggttatcctaataattaaacacatttcatttctcggcaaacagaatctcaaagtctttcttttaaagactttgtcttctccactgctatctttgattctattgttgccctcagtatcttactgtttactgagtgctgcctgcatgcttggggactgtgttaagggctgaaaattcagaaatcttgaaactagcagacagatctcagaagtgaatctgtgatctggaatgttaagtgctttacctacaggtcctagttgaatttgcccaatgatcaatcaggtacaattctcattattacacagctagtaattggcagagcaggagtttgaatccaggtctgtctcattccaaagttcacttcctttcacggtcttttggtgctctttcatgtgtcagttaagtttaaagtgcagctatttttcatagaccctttccataagtgactacaggcatgctatatgactgcagcaacaagcttgcttgttggaaacttttttggtacaatttttctgctaactcacatcaaagatctcaaagccagcaatgtccaagaccccaatgaagtactgcctgggctgcttggtgtccagctgctggttgatgcgggtgaccatccacaagaacatcttatcgtagacagctttggccagagcacccactgcattgtacaccttcacagataaagtttgttggtgttattaaagacatgtcatgaaggcctgggatgtgtgtgattcattgaggtcatgcacttacctgctgcacagtttgacctttggtgacatactcattgccgaccttgaccctagggtagcagagggctttgagcagatctgcagagttcagattttggagataggctgccttgtcagcaactgcagaaacataattcagatacctaatatgacttactctgggacccacagttcaaaggggcatagtattgagtaaataactttgtagaaagtctgtgtgtgggtacatctgagtatgtccatcaggagctcagctgtaaagaagacttgaattttggaatggacatttttgcctatattctctcattaaacccagatggagattcatttggtaccttcagtgccatctggctcagcttgctcctcacgctgcttttgcttgaatttcatgttcccataatgcatcacagcccctgtgagcttatagatggacactctttcatctgaagtaaagcccagaatttcaatggcactctaccatgagagatgagaagacaaagattagggcacaagagaatttatactgtatcttttacacacatatagatggctgttattgccattcccatgcataatggattttaaattaaaattcatgtataacttacatctgtagccatcaactcttcttggtcatcaatgctgggcactgtgatctccccttgactgacgaaggcataatcgtatgggttggtggtgatcaggagcatttctgggtcacagaattcagggcatatgttttacattagaagatagtacagtgacaatcttctagctatgaatttatttcttaccaattagatctggcttcttgttagacatgatctgataaaaaatatgatagcttctttcagcctttagctggaaagtaactctagacttctccagaagatctgcaacggatagtagacatcagattatggggaaaaattacacaatgtcctggagtgatttgaggacttgggatcattagctaaatctcactggcctcttgagatttcaactgaatgttcctgtgaagtaccacatattatgtctctacaaacactattgcagttcctcctgcctcctgggaaaaaagtgaaatatgcttggctcaagatattcacttctcatacagaagatccttgacatttggaatataattgagtcctgagactccctctgcagggtcctgtcgccatataatagagggactactaaaagcaacagtattaaagctcagactaggaataaatcacatatcctcaatccctggacaacttgtttacttctagtgttagttttttcttaaaaaaaaaattgaaatcattctgaggctggaatactttggacatgcccagcagttcctggcagttcccacagaagcattacctcatgactggagtgggtaaagcatactgtgggctatggataagactgacattaaccacaagcatgtttggcagcagactggtgctttacaagctccatgttcagcaggagctgcaaagtgttcctccaaaccaatatttgtcattcttggattctatttaggaggtcctgttactcacatgtttcaatatcagcagaagccagtttccctgtggtaccgaagtggatcctgatgaatttacccttgtaagtaaaaaaaatgatgttatacccaaagcttgaagtacgtagtggggatgccactgaaataattcagacatgctttctctggcatctaaaggcagagaagaccctttggcaaccaagagacttacaaagcgagaggagttgtcattcctcacggtcttggcgttgccaaaggcctccagtagggggttggcactgatgatttgatcttccagagtcccctgcaaaggcaagagcagtccttgcatctggggcttgggaatttcctacctgagagtcccgacagagcctggattctgactaacaatcagactcacctgcattttgccagaagtaacttcttccttcttcttctccccagtaactgcaattgttgcaaagtactggatgacacgcttggtgttcacagtcttccctgcgccagattctccgctgtcaaagaccaaacgtatgagaaattaagcactgtgacaaatgaaactacaactacctcatggctttgtctttatatctctattagagagccttttacatctttcttttcagcctacatatagctcgtattatttcttttgctttgcactggcaagaagtagaaaaaatcagtcattgttcatttaacacgtatttcttgagtgtttataatgtgtcagctttttttctgggtgctgaggcctgggcttgaggggtctgaaaagcagctactcagcacctctgtagtgaatggaacaattagtaggaaactctatgaaacgtgcatgtgtttttccatttcctcggactagagacatggctcaagtttggtctttgaaggaacagacattctctaagtgggccttaaaaatgaaccactagtagtatttccaaactgttgtaccttttgaaggctgtatgctgctcattgcactatactgggttccagcccagctcattttacactttctacacaccaaaaagttctgtggaactttcaagaccagcaaatgaggtgatttagaacattattattttacattctaatgcaatgtaaaccttataataaagctaaaccaatatctagttccaggttgatcattcagtgctttagtagagaacattaactaatttctttttttggtttgtcatttttccagtaagaacaaactgccaataaatctcagaataggaatacatacgtgatcaagatagactgattctcccgatctagaagaaaaacagtggaaaatcagcatatgtatcagttacacaaacaaaactttctatagtgaaacagggcatttgagtataagtgtcatgtattcagtggggtttttcaatatattatggtaaagttatgggtgtgtcctgctggtttaatataaagagcagtattctccaaagctagatacattccgtagttgtcatctgtagatttcaatggcatgctatctgctaattaatgcatatagctgaaaaatgcataatatgctaaaggcttggactattatttaatagattgaaatagtgttaatcaagccatgactgagattttgtttctaaatgtgtcagatgacttcacaaagagaaaaaatttactatcttatggccacagactaacttcaatatagccctaacttcgatcagccttccccaaagtgtaccattgtgttaaagaaagatgaggtaagagaggatgcctcaatcaaaataaaatctttctaaggggggaaaacaatttctgtttatatgtgtgtagccccaaaacatcatcttcattcaaacagaggatattatatctgagatgtactctgataactttaaagagatgacagtacttgtaaaagaatctaatttataattaacaagaaactgaggcaccaaaaggattgaactcctatttttcatttctattcagataatacatgatttatatgattcagttgttacttaatcttggctcttattacttaaatatataaaataaattgtgtgtttccaagcaaggagaccataaacaaattaaacttaatgggatggagtaatagcatggcctagtaaagtcagtgaggtgtaatcaggagagctgtgttttaatacgagctttgacagtatatacttctctgtgctttagtcacctctgctgaacaaccaggggcgtgaattgggtttttttctaaaggtctttttttagttctaatattttgtgattatggatggtaaaataattcatatgaaaaccagctgagccactcaccagtcagcatgaactgataggcattgtcagagatggagaagatgtggggtggggcctcctggcgctttttgcctcggtaggctgtcaccacctctgcattatacactggcaaccacttgtaggggttgacagtgacacagaacaagcctgagtaggtctgcacccaaaacaaaagggaggaacagaattatttgatggggaccttaatcatctactacttttcaaaaactattaactactctcatgagtagaagaccgtgagaaagaactcacgtagatcatccaggctgcgtagcgctctttgaggttgtacagcacagcaggctcgtgtagatgagtcatcatggccatgtcctcgatcttgtcatatttgggagggttcatggggaagacttggtcatctttcactgttacagtctgtccagtcaaacaagagaggccagatcaaaaagtaagtgctaacttaacccaaaatgaggcagagtctaatcagctccaggtgtttttactcacagctccagcttcggtcttagctgtcaccttccccccttccctgctctgcactgttgctttcacaaaggactccttagggtccaccacaaagactgatgtcttggcatcaaaaggcttgttctgggcttcaattcgctccctttcagactttcggaggaaaggagcagcctccccaaaaatggccatctcagagtcggaactcatggctgcaggttattgatggtagcccagttaaggaccctggctgggagaggaagaaaagaaattgtagaaattaagaaactggaccattagattcacatttaaaactttaaaaaaaaatttactgaccaattgagtgcttagcattgcattgggtatgaccacctccctggcttggttgaggataaaatgtcagtctccttgttctgtgccagtgctgacagacacttaatcatgcatttggaaagagactgttgtttctggctcacctattgcagtctcttagctgctttctctgtttcatttgttaggtatattaatctttataagctgcctatcattggcttatagagaacataaagctataatggtggcaggatagtctccagttctttcacttatagtttttatcttcccaactggattataagcaccttgcaggcagggagcactcttctttttatggtatccttcacacctcttagaacaaatgctggacacagagaaaggctcaaagctggcttggtgaattaaaagaacaataggaatatgttgctataattttaggaactattctgtacatgacagaaatattttcattataaacttgggagttacgaagacttcctaatatacaggaaagcagaaatgtgtggctctttgttttgcattgttaaaaaatgttctgttatccatcaatttctgttgtctctgtataataattttgacaaactcaacttcttcactgatctttagcatttcttaaatatttattataaaacgttattacctatgttttcttgctctattattaacatttttataacaatttcacaaaacttgttcttttcaggatccccctcttgccacattagctagcattcattaatgctgtcaataatcttcatgtatattctactttataataataaagataccttttccagggaagctcatttggatacatttctcccattgaaactatgttgactcagataacataattaaaatgcttcatcttgctgaatatgctgacaatcatgtttcgtattgtgtgtgtgtatatatacatatgtgtgtgtgtgtgtgtatatattcgttaatttttattttatagattgtgaaacaacatgcagttaagcaactttttccaaggcaaagattcagaccattctatttatccaattagacatcatctctcataggtttttatatttatagtgctgaggaaaagccatggtatagaaaatttaaattttctctataattgagtaacactttgaaatgttacattgcatattgtaatgcagtcatttaaaagataaactacaatgctggaaatagtgaatgaaattcactattgtgaataaaattcccaaggactctgagaaagcattttcatatattgcgagggatatgagttaaggagaaccagtttctaaagtcattctccattttttaagagaagcgtgatcaaccatgaaatggaaatgattttttttatcacttccctcaccccgcccctcaccactgtccaaaccactgcagaagattccttgcactctgtgaggaatgagaaaaaaaaaaatcagaatcttaccgtagagatgcgaccttaaagtggatcagaactgtaagaaaaagagcaaacctcttctgattaaattataacaattcccgattatagaacaattcttaactgagaaccaggaaatgactgggaagactacaacatctaattaaaattgctacggagtaagctggtgcttcactggcagggctgccagggacagtgggagccaggatgtgtggcatgcacgcgggcagccagacatcccttaccgtcctccagacagagccctgtcctcacacacacttaccttgaagctttatgaggagagacaagtcatactcattccaagggtacttttataggctcaaatatggaaaacacgtaacctcctcctctttcttaaaacatatttggcaaaacatgtttttggcattgaaggtctccaagcctaattcccctcatattaaagatgtttggatataattagaaatatttcctctcatattgggttaagtatatgaatcaatctcctataaataatttgagtcgttggcaatcttaaagttgttggcctttggaatgtaaggtgttgtttcaaagacagctaagttctggaatccctggactttgttgcctactgctcttctgtttcacagagtcgcctgtgtgaagtcttttcaactgcctgcgcagttacagatagtgtactcgggaggaaaacttctgctctttagcagagggttataaaaacgttgctttctctcaaaaagatttcctttttttttttttttttttttttgcaatttattgtgctttttcaaagttgcttggaaatttaattttgaaacttgcttcatgaagagcagccaaagatagcttcttttgtttccttcaatcagtcgcctcttattcattgtcaaatcattccaccggcacttcggacttgctccgaaattgcattgccttccaaacagagatgtcctgcttctctcatttttttttggtgcccaagttgcttgtgaaatcttgtttcctctatgaaactcaacataagaaaatattggaaacagggtatttctctgtctaaatatgcagcatcgatgatttttcctctatcagcagtccatgggatatatttagtattttgcttacaaacaatacctgaatattgttttctattttaattttttaaaaaagtttattttactgtctttgtggcctcacgtctctgtctgtcagcattgtctggctaggactgggacaacatttgcttaatatacctggttttgcacccacatctgtattattgtacttatatctcaattgatttaatggctatagcttgccttatgaaaggagatatctggatatactagttgtaaaggtcacatagttttattaccataagggatcatctaattcatctttctcattttactaataaagcaactgagatccaaaaaatagaagagaatctccacaaatcacacagcagtttagactctggtcatctgacttgcggtccagcgtactcacttgtgacactcttctacctggggtagattaaagccatcaggaagggtattgcagggatgtgcgtctgagagggcctttcctagccatctattagcctgctttgttaccacaggtacctaattttactttcttacatgtctgtttctttactaggcacctgcaaaatgtgggtaatgattttcaggaagataaaacattttaataatgctctcaataggatctgatgggaatcttcagacaaccttttgtcttgctctggataaacttttcaataagtaggaagtaagatattgtttttgtttattactgccacgttataaagcacttaagcaattccacgtgatacaggaacaaagtgaaagaggggcttatgcagcgagaagagcaattccacaccctttctaaggccagtgcgacagtgtgaatccaacttacctgttaaactaccatgtctaatttacatcattttcacacagtgccatttagaccaagatactcttgctttctatttgatgggaagttaccatttagctcttcctttattctgtcgaggaaggttatatttttggctatgcatctcagctgcatccagtttaaaaatcttgatcctctaggaaaacgtctctgagtggtccagattgctatgatatctactttttgtaccaaactcatacccatcattatgtgtgttgaatatagatttgaataacctactttgagatcatattttcttgacacttttagtcatttattttggctctttatatgattatctgggagaccataaagattggaaacataagctaatagctcatggatactacattataacgtaaaaataatattctctatgtctccagatttgatagacaccctgtagttttcatagggagaagagtcatatttaatttaattttgaaacttgcttcgtgaagaacaaggtcgtgtcaaacccattacccagtgcacctactgtgggcatatggtacattggaattgataatgtaaatatccatgggctaattaagaatattttgtatttatattcttgataacagttattcaacaaagagaattaatgatacaattcagtttgaatcccctatgtgagaatatagctagtactatcctgaaaaaggttcatgttaggggaagcaggagctttctaagattttactgtactcagatatcaggaaaggttagaaagaaataaaatagacttccaaatttctgttcattagaacagtctttctggataagtgacatctttacagccttaaagtgttgccgtagacccccaaaaaagtcaccaattgaatgtgattgtttgacaactctggtgactattcaaactttgacatggcttcaggaaagagaaaagacaagaccagtctaaggatattgtttgcaaactaccctatgctttatttcctttgcaacagggtagaatacacaataattacagagggaaatgaccaaagatgtcacattttgtgcctgtcttcagtcattccatggcatcaggacatgatcactcttcacttatgacttttgtgtgaacctcccggctcttcacccgcagtttgttcacctgggactcagcaatgtcagcccgttcctcggcctcctccagctcatgctggagcttgcggaatttagctagattggtgttggattgttcctcctgagaataaaaatggaattgtaaggaactcatacttgcatctttctagactctttagacctaatagaagaaaggacttggcatctatggagaagcaacatctagggattatcattgaaattaattttaagatttgtttattgatgtcatatatatatatatatatatacacacacacatacatacatacgtatctcacattcctattttggcaaccaaaacacataaaatatatgtaccacaagtagaataagaagaaaaatataagcttagagaggaaggcaagaatattaaagtcatagttgttaatgcttgctataagatgatgattttcccttgagttagattttttttatcatattaagaatgaacttattaagtttttaaaaattgaaataaatattggattttgtcatgtatcattttggcacatttcaaaatggttacttttttcctcctgcattggatgtaatgattctattgacagataacctaatattaggtaatctttacattgtaagaattaaccttatttaatcactggaagacaattcctttaataaagtaagacttactacttagtaatttatctttgctgtaactgtctttatgagtaaaattgcctttagtttttctccctctgtcctctcttgggcaggttttggtatgagggttatgtgagcttcttaaaatgaactggacagctttctatcttttcccatgctcttgaacagctacatagctgggggattatctgttccttgaaattttgaaagacctatctggacttgggtccatttccagaagtaattcagccaacttagtaatttatatcctcctagaaaaatcatcaatttttttcagggtttcaactttattgatagatgtgttttatattaaaaaataatcctctatgtatatagcttattccctttctcatttctaatgttgtttatattttctctcttattttccttgatgaaactagttataatacatttattttattaattccccagaagttacaaatattactgaagttatcaaatagaaaatagtatactctaattcaccaatttctacttttatttttaacagtacttcttacttctactgttttattattatttataatttatttattggactgtctgtttgtttatttttacttttggttcataatgaaagcatttaaagcaatgaattagcctcctagcacagctttgactacattctgtaggtttgtaaaagtagcatcttccttgtgattttacttataattaataattatttagtaattatgtttttatttttactttaaaccaagagttatttaagaaagttagtttttttaatatttaagtactcaagaatttttgcttatattttgtcatcactttacaactccgtcatactgtggccggagaatatggcctgtattatttctgcttttaatttttttcaggattcttggtggattgaaagtttacttttaaaatgaagctactgatattacaaatgatacacaagaattattgtacaaaaacaaatgttaaatatgcatgcagtagtctttaaagcaaacagcttgttcactacaagaagtagtaattatttattagcttaatttgaggacttcaatcttaaaaatacttacagcctcctcagcttgtctcttataagatttcacttttgcctgaagtttatctaccaaatcttgaagcctgagaatattctttctatcttcttccgtctgaaagattataaaaagtccaggaccttaattactaaagcacatgactattgcatcattgcatatgagtatttcacataaacttcgaccagtgcttagccgctaaaaactactggctgtacctggtaagtgagttccttcactcgcctctcatgtttgcgcagacctttgacagcctcagcattacgcttttgctcactctcaacctctccttccagctcccgtacctgcaaataagtaggctcttaagaactttgatccaataaggcactgaaagcagatggaaatagacagatattgggagacccaccctggcctccagtttctggatctgcttcttcccacccttcagggccagctgctcagcctcatccagacggagctgcagatccttcacggtctgctccatgttcttcttcatccgctccaggtgggcgctggtgtcctgctccttcttcagctcctcagccatcatggcggcctaaatagcaaataaatcaagaaaaccaagaaagttatagatgtcaggaaatcttactgctaaatcagtggacaagtgtgcctgccactcacatcagtgatggccttcttggccttttcttctgcattgcgggcttcctggagaatgtcctccatctctccttgcatttgggaaatatctgtctccagcttcttcttggtgttgatcaggctggtgttctgtttaaaaagaatttgtacatttaaaaaattgtgttaccaaagtatttattggtaaccacttcttgaaaaaaattcagataaaaatttgcaagtcaaaaaatgccttttaatattaaagaattaaaggattgtgttatgtaatatgattaaataaaatataaatgttatagaatattcagcatcttcaagtgtataggtcacaagcagaccaagtagctctataattttataattatcatttaccaatagaccattcacagggataaaagtataatggactttctcataacattccatttctccagaatgaaatgtgaatattgataatgagggccaataaagatattaacacaatagaatacgggggcagccttagaatattatatgaagcaaatcaacaatagtttttcaaagcaaaacagtgaaagatttctcagtaatgcagaattactattctgtattatttgaaaagaaaatttgatagacatattaggtctagctgtcttatgaaaactcaggcttatctattctgggacatataaaatttactaaggagagttctttgtgctgaatcccacctgggtgtgcagtagctgaacacgctcactggcatccaggagctcctgttctgcgatttttctgctcctctctgtctgttccagagtggcccgcagctcctcgatctcagcctgcagcaggttggctctgcgctccaccatggccagctgttccttcaggtcctcctggctccggagagcatcatccaggtggatctgggtatcctgtgaaacaaaccatcattgagacatcatgttctcagggttgcaggcaccccaatagtcctgggaccatctcttggacatatttaccttgaggatgccttgggtgttcctgtagttcctcagggcctcagcagccatgcggttggcatggttcagctggatttccatttcattgaggtctccctccatcttcttcttgagcctaatggcatcattcctactcctgatctcagcatccagcgtgctctgcatggactccacgattctaatgtggtttctcttcagctggtcaatttcctcatctttttcagcaattttcctatcaacctcagacttgacttggttcaactcaagctggatgcgcaggatctttccctcttcatgttcaagagatgccttaatgacagcaagaggtgacattagcaaggaaccaaaagctttatgaagtttttctgcacagcaataattttgtgctatgtgtctttttattcactctatgcagatgtacctaattattttccagatttttttataatgcacaattttacatgtacctctgcttcttctaaagcagcctgaagttcacacttttcttgttccacttgtttctttattttctccagttcatggatacgtttccctccttctgcaatctgttccgtgaggtcagaaatctcctctgttgtttgagtaaaagacaggtagggatttggttaaacatgtgacataagggagagattcttccaagttatgaatattattgaatatgatagggacttacgctgtaagtttttgttctctcgcttcagggtttctagctgatccaaagattcctcataggcattctttatcttgaacagctcagtgccaagggaacgggcctccttctgggaggcctcaagctcagcatgcgtttcctcacatttctgtttccattctgccaggatctgaaaaaccaagacctgttacctgctgcaaagacaaaagagtagagtaaagagcagaagatgctggaggaattaccttatcgaagttcctttgctttttgtcaagggcggcacaggcggcatttgtcctctccacatcaagcatgaggtcctcgacctcattctgcagccgctgcttcgtcttttcgagggaagcacatttggcgttcacagcttctacatgttcctcagctgcctgcagccgctgggccagcttcttccttgaatattatacatgttttcagagagaagtgaaccataatatgaattatgagctattgccacacacgctgaagagtgttagaaacttcacattaatgctgcccagccacctttcattctttcaacaaatattgatgagccccttttatgaaccagacactggctacgcagcagtgaccaagacaaaaaagatctctgcttcatgaagaccacaaacaagtgagagaggtaaacaataagcaaatcagaacatccgtaataataccttacagatacaagtgcaatgaagcaaaataaaataaatggtgggcaactactctagatattcagtgaaggcctccatgaagagatatttgagtcaagagctaaaagtcagagagccaaagggaagtctgtggagagggtatttcagacagagagaaaagcaggtacaagcccctgatgcagcgatgagctcattgtgcttgacaaacagcaatgaggcccctaattatcagtgtaattatttgctcttctttgttttcttaactagattttaggatcgtaaggcagggaccatatttgatttattcatgtcttattctcagggcctgattgtgactggcacataaaagcagattaatgagcatttgtggactaattcactgaatcttcaaaggtcatgtctttctgattcaatatgcaaagttttctgctcattctctcatatctgtgcacatacttggcctcctccagctcctctgtgcgctggatggcgtccgtctcgtatttggtcctccattgggcaacctcggtgttggccttggacagtgctctctgcagctcggccttggattcctgctcctcctcatactgttcccgcagcaggtcacagtcgtggcgggaagactgcagggcatgcgccagggcgttcttggcctatggaggcagttacaccttcattttactggatatttaaatatttaactcttaactttcaaaaccttttgaaagctggtataacaggctccatgtagaatcagctcatgagggaaaaaatcagtcttagaatcataattacttttatctcctcttcaagttgcctctttaattcttcaatctgttgagtaaaggcttgtttgcctcttgataactgagacaccagagcttccttttcatcaagctggcgtgaaaactcacctgatggacaaaagaaatggcaccattttttaggtgaaaaacaagattctgcaagcccatgttagaaagaaattttgactcttattttcccaaattgagtgctcagatggttgaattctatactgacatcttcatgctcaatgcaggttttcagtttttatggtgaaactttcagatcaatcggaatgaataaatacagcttaaattccttttgtcctttccataactaattctttcagaattatatgatattgtgcaaaatctggtgaggactgtcaaatgagtaagctaaaatgtctaattctacagggtccccattccataggacttttgagagactgggatattcattgccccattctggaagttacttgaccctcatataaataaagagaaacttggcctgaaagagaagccctgaactcatgctggagtaaccgctaatcccagcatcctcgcaatgagcaaatactcaaggccattctggaacagagcttgattttgtcctattgaaacctttatctccagcattgtcccaagatgaccttgcacataggtcaggtgtctgagctgttcagtgaatcagacatgttctcagctgttttattaggctcccacttcaccaaatcagtccgttgttcttaatcacatcctctccaccctgaagctgcacagaagaggggagagttaccagattcagtctgcaggcgccccctctgcgcagtcaggtcattgatcagccgctgctgctcctcttcctttgatttcagttcactcagttggtcctctagagtccggcacattttctctaggtttccctatagaagaaaaagtaaaagaagaaaacagagaccttttaagcgaataataatcacctttgcagttactgtaacttctccccaaaataaaaaatacaatatttatcttaatatagaaaagaaaccaaattatcttatatgtaatgtaatgcagaaaaatttttctttctttctttttttttttttttgagacagagtcttgctctgtccccaggctggagtgcagtggcgtgatctcgactcactgcaacctccgcctcccgggttcaagcgattctcctgcctcagcctcctgaatagctgggactgcaggcgcgcgccaccacacttggttgacttttcttatattttatgaaagctaatcatggagctctgttcaatattaatatgaaaatgttaaggttatattctaattttaagattttgttagaattgtatagtgtacattttctaaaagcatgttctaaaatacttcattgcctttatgtacgatgaaactttccttatttcaatttccttgaaataattggagacctttgttctataactggagacttggagaacacagatggcttatgttcaaaagctggtgttgtcgtttattaatggcgtgatgggtcaaagtgcttggcctctttgaatttctgatcctttatttgttaagttgaaataataaaaaatgctgattttttgtgcttacttccctgaattactgcagttaacaaatgacttaatgtgtaaaaagtgccctgtgcaaactatgatgtgtccataatgcattattttcaataacaatttcccagaatttgtagtaccttggctttggagaccgtttctacattactagcaaggtcatcaatctccatcttcatctcactcttctccttctccagcttctgcttcactcgctgcaggttgtcaatctgctccccaagctcggccacactatctgcatgcttcttcctcagggtggccgctgtggcttcatgctgtagggtggcctcctccaggtccctgcgcattttctggaactcagcctcccgcttcttgttcatctcaatctgggctgaagtggccccaccggcttcttccagcctctcgctgatctcctccagctcccgggagaggtcagagcgctgcttctctgctttggcccgggaggcccgctctgcctcgatttcctcctccagctcctcaatgcgggcctgggaatggtggaaaatacaaactcagcttctttgtgtcataactgcctccgagccagactgatgaaaatcatgtacttacttgcaattctttaattttcttctgcaattgaatgccaagtgcctgttcatcttcaatcttgctttgcagattgctgatttcaaactctttccttttagaaaagtagcaaaggacaacaatttagtccgtatctaatgttggaagcaaatccataagcaattctttcttacttactttttgagcttttcatcaagttgctgtttctcattttcaatgtccattatggattcttgggccaacttcaagtcaccctcaagtttcctcttagccctttctaggtccatgcgaagtttcttttcttgctccaaggacccttcaagctaaatataaattatgttgaatcagaaggaatgcttatcttcctttagaagaaaagaatgtccttgatgataccagacttacatcatccacttgttgttcaagtttgattttagctttggtcagggtgttgactttgtcctcctctgcctgcaggtcatccagggtctgctggtgggcctcctggagagccttcttctccttggtcagcttagcaatggtttcatccagacctgccatctcttctgtgaggtttttcacctacaaaggtgaagaaagcagtttagttgctataaagcacctttgttgggtggcagaacctctatacagtactgtagaatatgattgataccttgttttctgtggcatgtttctccttctcaaccttggccagtgtcagctcaaggtcatcaatgtctttcttgagttctgaacattcatcctccagtttcctcttcttggctgtcagctcagcattgatctcttcctcatcctcagctctctcagtcacctctttgattttggcttctagctggattttggttttgattagctggtcacacctttcctctgcatcagccaagccttcggcttccttaagttggaaacaagatcaaaattgggaagaaagaatgaaatacttcacaatggataagagtgtatgtttctgcatttgatcttttgaatttcctatattcatttgtttactccttcacaaatttttgtttcatgaaccaccctactgtgtacattttccacatgtgggtaagccaaaatgtaccagttgtcattttgttcccctaaaagaatgtattctacagtagattagaaaacctatttcccaaaagctaccattaatgtagaaagcaattagtgacataacagatcagagaagttggatcagagatggtttcatgaaagaattgctgtttgatttgggccttgagagaggggtaggatttgcttttgcagaaatcaacttattgtggagaggagcaggagggttgtggggaagcattctagcaggacaaattcaagatacagctgctactgattttttttttttgtagtactggaggatgctcctgattatgatgtactaaattcaagttgaaacataaagtaatcaagaaattcctggcaacctgctgtttccaattaagggggacagggcaggcgggaaatgaaggagacactggaatatatactcatcagtaatcctccatatcagtctttgactacattaaggaatgcagggtgctatgtataactgtgtaacgaatacagtggtttagtacagattctgcataaatctctggggacaacagaagagaatacagggtagatttggagggctttttccttctgtaatctagaaggagttattatactgctcaacgttgacagagagaccagtcttaacagaaaaaaatatgactttatgataagtagaccaattcaattcactccaaataaaacatagtcttataaattatagtctgaagttgatggaagcagttctaaaatgattggttcaggagagggcagtgagcaggctggatggaagaagagacaattgggaagtaggctgagcaactttggtgctgatgcagcaatgtgggtgtgacatgatgggacactgactgtggagacagattagaaagagggagtctgagtttttgagatcaatatcacacgataattcagtaaaatttgatgagagtgctgtcatatgtcagctgttcctattataatttaagacccgtggacatctagaagttcaaggaagtttccgaaaaatattactctctccatgctatcctccccttcatattttatttgggattgtgtcatattaaaatcatttttatggactgtatttaaagagaaaataagtcaaaaatcttgtggtttgatgaaattgtgtacaatggaaaatgagggatatttctacctcactgccctggtgctggtttgttgggggttattgggcaatggaggaatgtttggaccttttcgtgccattggagtgttttaaccttttccttccaatgagtgtctcccttgcaattacccaactcatggcccacaatggccaaagttctagcacctgcatcctggttagtgataccaagggtgatattccaactcacagcctgaacttggagctgcaagtcatttttttctttcaacagcgtcaccatcttttcttccagttccttcctttttgcctctgacttggcaagttcgtctttaattttctgaaattcttccttcatggtggccatctccttctcagtttctgcactcttcaacagaggcttgatcttgaagaagagtttcatccagggccagtgcttgacattcatgaaggatctgatattgtactggatacagaagatggcctccctgaaatttaattgatgcaaattagtattgtgtggttgatgcaatgggatgaaaccttggcagtgagagttggaggttctgcttcaccttgttcctactctgctttcaaacatgcagatgaaaaaattctatttcgggatgatggtcaaggtcttgctaaggtcactcatttctctacatcactgcttctcaaactttggcatgcataagaatcacctgaagggcttgttaaaatactgactcctgaacctcacctccgtagattcagattcagattcagaagatctagggtggagcctgaaaattggcacttttaacaagtttgcaagaaatgctgatgttgcaagtccaaggagcaccctttgagaagccttgctgtatgtcagtgcttctcaaacattgctactaaaacaccactaagggcagtgaagggggaacacagctctttaggggtatatggggcaggagatattaaaaactcagaatttcttagaaaatatctggctttatatgttaatgttgtgtgaattttgtattctattctctaataccacttttgttttcatctaaatgatttttacagctaattaccccatatatagacaattacccaaatatatatatatcgtggatcatgaccaaaatttattatttttaataaaatggaatatagttgaaaatattagcataattacaagtggtaaaaataaaatttgcttcatataaattatttatatatctgcatacacatatgtatatgtgtagatgtataggtggcaatgtaaaatgcctttctcaacatggagaaatggtcctgatcacagacatcctgtactttgagacacctggctctatagtctttgaactctgtccttgcatcaaattagatcaccaaatagctacattccctgatgcattgtgttaacttactgcaaaaagtctttcacagataaatggcccctaatattttaaatcatgagagtttgataatataaatgatcagagggaaaaagttgtctctacagcctgtgtaaaagcactcttgagtatactgtctgttttgcaggtcaatgtcccttatctaatgatctgtccaataaattcatattagaaacaggtgctagggcaaaagtttgcttctgcttactcactggtgtattttatcttattagataagaagtacacacttcttacctaacttctcaagtttttacccatgcaatcagatggtgatggttccttccttaagttttctggtacatgtgtattcccacttcattataggactcttattcatttcttctttagtgtccttatcataagctgagtcttaactgtaagccatttcaaatatgtttttgaagatggaatatgtgaataaacatattttttataccttctctccaccatcctctggtactccactcttgccaagaaccctctgcacctggcctgggttcgggtaatcagctgggccagcttgtcatctcgcatctcctctaggagccccagaagaccagctttgaaaaagacctgtgaatggaaagagttgcaaatcacaagctttaataaagttcaaagggacaggaatagcatcaggtaggatttacagaaaattaccttggtgtgcccaaatttatactgggtgtggtcaatgtcgatggatgcaaggagcttctcagaggccttcttgctatcaatgaattgcccttcagggattgcacttgcatttaataccttgtatctgttgaagtacatatagcttttaacaactagtttactgatgacacaaatgctagctaaacattaaatgattcattttttaaagcagagctttaaaaaaatattattctttgttcacaaggagaacattgtttatttgaatggtcaaccctttggcaaccaatttttattccatttgcctttccctcgcagttgcaactttcctttctgtctcatcagaccctgttcttagaaaagggttctgccttaagaaagggacacattatggtgtgcctaaccaataaaatgtaatctgttatctttactagatgcatttgctttttaaggccctgaatccaagaaagctacttttcattgaagaatttggtagacagtacactttaggtattcagaactatcctaatcacctaaaatcaaacttagacatgctttggatcttgagccctggaatcctctgtcagtgccacctgacccagacctgggagagatcagctcctagcagctgctacccagtccttccccacctctgccttttctttgattctcaagatgggcttatctagagaggagaaaagggacctgaggaacagtcattgtgacatgttccctctgcctccaggaaaccctgggagtctaatatgtgggagaaaaagacgaacatagatgataccaaaggaaatgacagaaaatgaatagctatgtttgtatggaagagtttctaactcaaccacttaataactgtgactttgggcaagtaccttaatttccctgagcctcagcttattcatctataaagtgaagtcttaatagtacctacttgcactgtgtttttgcgaggattaaacaagataatctgaacatattaagcactcaaaaaggtcgttcttaattattattggagttaacgtgtgcatctatgagctaagctaagtgcctgataaatccaatgaaaattccacaaggtgcttaaaattttgtatatttatattttaaaagtatttgaggctgggcatggtggctcatgcctgtaatcccaaaacttttggaggccaaggctggcggatgacctgaggtcaggagtttgagactagcctggccagcatggtgaaaccccatctgtactaaaaatgcaaaaattagctgggcgtggtggcatatgcctgtagtcccagctacttgggaggctgaggcaggagaatcgcttgaacccaggaggcagaggttgcagtgaactgagatcacgccattgcactccagcctgggtgacagagcaagactttgtctcaaaacaaaagtgttcgagacttgagacttgtaatttttttacttctttttgtgacaaaactaacaagtagaggcatatgtttcactaaattgttttgcttgcattaaacttgttcatattaaacttcagaatacaccataatcaggagaaactgacctctgtttgaagtctgcataaaggattctgcttggaaatcctttcctacagatgcggatgccttccagcacaccgttacacctcagctggtggaggacaagctcatgctccatggcacctaaaaatgcatatttatttcactgcagagctgttgaaaaggaggtgtggcagtcatcctttgcactttcattatggaatttcttaccaggagtttttgtctcattggggatgatacacctcacaaagtgaggatgggtactcctgaggttggtcatcagcttgttcaaattctcctgtaaaaccaggaaaaatcctgtcattttaggctctagacatggatatgagcagtcattggtgtctataaaatcaatatctatagctgagttgaatgaccagtatggactgcattcatataaggcaacactttgaatgcttcttctgagatgctttttcctcctcaatagatctttctgcacttgagtttccgagagttacacacagaacaaggaaagcatcctggcatgtgcttcttttcagtttatgccaacaccatcctttctaccctggtccctggccatacacatacatttacaaggccattgccttcccatgcgagatgatcgctctttcttctaccaaattccatagttctccaataaggaaatggaagcctgcaccacatttggacgttttccttataatacagctcctcttttccagctctatcaatttttaggggatagagattatctacaggggagcaatcctaccaattataattgaaaattgactcgattaagagcaaggataccatattagctgcactgcagatttgctgctagaattcatgagttcattagccatactgatgtcttttagtctctctgagttcatgtcattgctctttttcatggctcagctagattatgaatggcagagtattatggtctataagattttctataaaatatttctcattatttgacttagcatgaaaagtgaactaataatttctgagtaatttaaatcccttctttccaaagttagatcaacagagtcactagttactatcagtccttttctaaactactcatggaatgatcttgtacttttaaaagcaaattttatgcattgggtacagtgtacactgctctggtgatgggtgcaccaaaatctcagaaatcaccactaaagaacttatgcatgtaacccaacaccacctgttccccaaaacctattgaaataaaaaataaatttaaaaaaagaaaagacgaggggaattttgcccagcgagatgtcaaagcatattacaaagtaattttaataaatgtaatgtgatattagtatatgaatagataaatatatccttagaacaaaaatagaagttcagaaaaacagacccatgtaaaaaaaatcccaaagtaattggagaatgtcaaaaacaatttcttccttactctgaaaagggcagacactgtctggaaagaagagcccttcttcttaccacctttcttggcccctccaccagctccctctgaagaaaaaggaagaaaagaaatactgttttgaattggcagggctacttcttgcgtatttgctgatttctgtgttcatcgagtggagccttttttctacccagctggcctctctgattgagcctgaatgaatcttatttttcaactaagtttgcagccacttatctgtgattctttctccagtgggaaatgaggccagggatattcacctgaccgtatagagagggattccctaatattaggacatgtgaggagctaacttcaaaaatcatcaatagaagctagtactgagaggtggaagtttgtcactctgttgcctaagatttataccctcagatactctatatatcctgcagatgtggaggaagaagtaggagagaatcgtagaagctgaggcttttcattggttgagagcctgataatcctctctgactctgcaatagggctcctgtcagcagtggagtgagccacaaatgtataattacaaggctgcctatctattcaatacttggaggaaccaggggcttggtctgcaacccttctgccagacctaagagatcactagcttcaatttaacatcacattttgtaatacctagagagtattattaacatttgagcattacctccttcagcagtttgagccccagagaagagctgagctagagttttcattgcagacttctggtacagtccaaccacggtctcattcagggggtccttgttcttctccagccagccagtaatgttgtagtccacaacaccagcatagtgaatcagagcgaagtgggcctcggccttgcctttgaccaccttgggcttctggaagttggcagacttgcccaggtgctggtcatacagcttgttcttgaaggaggtgtctgttgccttagggaacatgcactcctcttccaggatggagaagatgcccataggctaaaaagcagaccacaacacaaaattgtacttctatttttttttctgtctatagaattaaaataaaaagcagcgaataatatagttgccgcaaaatatggtttcagaaatgcaaaaccaaccttctcgatgagctcgatgcaggcagccaggtccatcccgaagtcgatgaacgtccactcgatgccttccttcttgtactcctcctgctccagcacgaacatgtggtggttgaaaaactgttgcagtttctcattggtgaagttgatgcacagctgctccaggctgttgaactaaataaatagatatgtttacttctctcttaagcaaattgagtattttttaaaatacagaacttttccattttaaaaatatgtgtccaagagcctttatattacagatattaaaatcactgggttaaagagactttgaaataaaaggtgaaaagtatggaaggtttgagggcatgtggaagctactatttttctgctgtcattttgtagaaaatcctaccattatgatattcttttcctgcatttgcttaagtttattcaggtattttcctgagtacctacttaatcatcctgtgtttattcccattatcttctacattttccagaaggtttacagttttctgttgactcatttaggagccaacttgcaacccatgagaagctggctgggaggagtctatcttgcttggcaatcacatggtcagcatggcaagtgaacaataatttgccacccctgttattctttaatgtgaaatgaaaaaaaaaaaagatcaagataccaagtattatataaagtatgacaatatacatttgtatttttaaaaattccccaaacagcactttgggaggctgaggtgggcggatcacgaggtcagaagatcgagaccattctggctaacatggtgaaacctcgtctctactaaaaaaaatacaaaaacattagccgggtgtggtggcaggtgcctgtagtcccagctattcgggaggctgaggcaggagaatggcgtgaacccaggaggcggagcttgcagtgagccgagatcacgccattgcactccagcctgggcaacagagtgagactccatctcaaaaaaaaaaaaaaaatcaccaaaatattaacattatatataaatagtagaattatgtggaatctttttccttgggaccttctatatcctctgcaatgccctaagttttgcttgtataattagaaaaaaaaattaaacttcttgaaaactataatcaagaaaaatatatttcgtaatcaaatatgaatttttatttcatgatatcacactaatgagtcttaaaagctaattgcatttgttactgctgactctaaattattaacgtttctcagctcttattgtctctaagtatttcttaaaatagaccttcaatcccactgtactaagctaattcagaactccctttgtatcaataacaagttggggagtccttattaagtgcattgttgttttttatagaagtggaattggtactacaataactgaccagttactctcttttaaggcttaaaataatttctacagtggtaagaaaaggtcatagtcttcactaattccttcatatagatatttccattgccttactgtaaaatcctctcaccaatcagctacaaactcacatcaaaaatctcaaaaccagcaatgtccaagaccccgatgaagtactgcctgggctgcttggtgtccagctgctggttgatgcgggcaaccatccacaggaacatcttctcgtagacggctttggccagagcacctactgcgttggacaccttaaaagacaaaattataactctcgaagttattaaaggcctatgaaaatgctttcatccctggcagttaatttgaattatgcacctacctgttctacagtctggcctttggtgacatactcattgccgaccttgaccctggggtagcagagagctttgagcagatctgcagagttcagactctggaggtaggccgccttgtcagcaactaaaaagaagaaagagtagaacaatgttattgtggcccaaagaaacccacttccttaaaaatattttttaaactacaagtattttgtgcagtgttttaaatatctctttctgagtatccttacccatttgttcattaagttcaagtttttgattatggggtagtttgccctaaagaacttcaataattataggaaacacctacctagtgcttatgtttcccattgcacattatttaggtatacagatactttaaaacttaattcttaaaagtgaatttaccttccctaggaaaattcctgggtaacaagttaagaatgtgattttcaaacaaatgcaaaatcatgggagtgacttagttgataccttctgtgccatctggctctgcttgctcctcacgctgcttttgcttaaattttaggttcccataatgcatcacagcccccgtgagcttgtaaatggagaccttttcttcattagtaaagcccaaaatatcaatagcactctgtcaatataaccaataggatagctgttaggttgtgatccacacgcttactgttaatactgcacattcccattgctggcctgaggaaactaccagtgctaatgggagacaaggaaccccttagattgggtatatagagagttggtcaaccaaaggccagcacagagcattagaattataggtgcataccctctgaagattcaaaacgggaacttagaacagagaacaaagatagtaaatctaaggaacttgttattttgagagatggtaggaatctaatgcaagtcaattgcaaaaaaaaaaaaatagtttagaaattttcagaaatgatagatctttagaacaatgtaaggggtaagcaaaatgttataggggcacatcatactcttttcatttgactccaaggggcatgtccatttgcatcctggaatcttcttttgccatttctactagacactgaatatttatctggatcaccattactctgacccaccataataattccaattttcttgtgttctacttacatctgtggccatcagttcttcctgatcatcgatgctggccacactgatctccccttgactgacaaatgggtaatcatatgggttcgtggtaatcagaagcatttctaagtacaggaaacagaacaaagataaacataattatcttcttcattaaaacaagagatttctagacaaattgtgaggcactatattgttgtgggaactcagggaccccaaatagagggaccggctgaagccatggtggaagaacataagttgtgaagatttcatggacatttattagttccccaaattaatacttttataatttcttacgcctgtctttactgcattctctgaacataaattgtgacgatttcatggacatttatcacttccccaatcaatactcttgtgatttcctatgcctgtctttactttaatctcttaatcctgtcatcttcataaactgaggatgaatgttgcctcaggaccctgtgatgactgcgttaactgcacaaattgttcgtaaagcatgtgtgtttaaacaatatgaaatctgggcaccttgaaaaaagaacaggataacagcggtgttcagggaacaagggagataaccattaggtctggctgcctgagagccgggtggaacacagccatatttctcttctttcaaaagcaaatagaagaaatatcgctgaattctttttctcagcaaggaacagccctgagaaagagtatgcgttcctagggggaggtctctaaaatggctgctctgggaatgttgtcttttacagttgtagataagggttgaaataagcctggtctcctttagcgctcccaggcctattaggacaaggaaatcccgcctagtaaattttaatcagaccggttgtctgctctcaaaccctgcctcctgataagatgttatcaatgacaatgggtgcccaaaactttattagcaattttaatttcaccccagtcctgtgatctcaccctgcctccatttgccttgtaatattttattaccttgtgaagcatgtgatctctgtgacccacaccctattcgtacactccctcccctttgaaaatcactaataaaaacttgctggttttgtggcttggggggcatcacagaatctgccgacatgtgatgtctcccccagatacccagctttaaaatttctctcttttgtactctttccctttatttctcagaccagccagcacttaggaaatagaaaagaacctatgtgaaataacattgaattattgggggtgggttcccccgatatcacatgatgctttgttgatgactgatgggcactggagaggcgtttaaaggatattaggcaccatcgcaaacaccttgaagttgatgtcatggtgctcttataaatccttattaaaaaataaaatggccgggcacagtgtctcatgcccataatcccatcactttgagaggccaaggtggccagatcacctgaggtcaggagttcgagaccagcctggacaacatggtgaaaccccatctctactaaaacacaaatattagccaggcatggtggcgcatgcctgtaatcccagctacttgggaggctggggcagggagaatcgcttgaacctgggaggtggaggtagctgtgagctgagatttcgccattgcactctggcctgggtgacaaagtgagactccatctcaacaaacaaacaaacaaacaaacaaaactattgtaatccaaagaggataatcacataatgggaaaagttgtatcactatagtgttgattatatacaatccagaattggaaataatctatctgtaaagagggtatggttaagtaatttgtgcttatttctagaatagaacactatgcaaccattggaaataatgatgtggagctatatttagtgacatggaaaaagctatgatacataattgctcagtaaaaaagtagattacaggagagcatgtaaccatgatttcagttatgaaaattgtatgtatgtatctatatgtagagatatgtatacagaaaatgactagagagatattcatccaagtgttcatggtggttatttcatagtagtaggaattagagatgttattttcagttttccttttgatttcctttgaatttttctaatgagcacatataaatttttaccaaactcacaaagctatttataaaataaaaaggcacataaacttgacaaaattcagtcatagaatactaggttggactgtgcattgataggtactgatgcagtaattctggaaaagaattatgacatttcttaccaataagttctggtttcttattcgatgtaatctggtaaaaaatatgataacttctctcagccttaagctggaaaacaactctagacttctctagcagatctggaaggaaacaaataacacataagaaaattgtaaaaattcatgtgacatgcgaatttgatttttggtcagttttttaggtcatatgaatcagaaatgattttaaagatatctgaacacttacatgtttcaatatcagcagatgccagttttccagtagtgccaaagtggattctgatgaatttacccttgaaataaaagctaatattactaccttttttttatataatattaaatctttgagaaattccaaacatttgatgctggtactttaatattaaatcaattcagagagtatttgcatcaggtagaaaaaggtgtatctcctattttataagtagaagagttttatctttgatttaaaaattgtaaatatttcttaagtatgtgaagtaatggatatgttaattagcatgttaatcattccataatatacacataacatatatcaaaacatcacattgtatttcgtaagtacaattattatttgtaaattaaaaataaaaattttaaaattgtgagtaagtgtagatcatgacagataagaaagaactcaggaaaaaggccatatatccttcaagatggggctttgatctatgttattacatgctcagaggaaaaggaaagaacaatgatgtaatagaatgggaatgaaaaagattcagagaatgtaattacaaacatctcataaattttgaccagtgaacagcatctattagcgtgtccaagagacttacaaagcgagaggagttgtcattcctcacggtcttggcgttgccaaaggcctccagtagggggttggcactgatgatttgatcttccagagtcccctgcaaaggcaagagcagtccttgcatctggggcttgggaatttcctacctgagagtcccgacagagtctggattctgactgtgacaatcagactcacctgtattttgccagaagtaatttcttccttcttcttctcaccagtaactgcaattgttgcaaagtactggatgacacgcttggtgttcacagtcttccctgcaccagattctccactgtcaaatcaaaactcaatcagatgtggtctcaaacctagcagctatcacagccatgtaaagaaagcataaaatctacttacgtgatcaggattgactgattctctcggtctacaaaagaaattatagacatttaatactgttttcttacatatttgtaaatgataagtaaagtaaaatggaatgaacttagtattattcagtctggactttgcaacctttagggcttggcaggctttagacctaccactttctccctccccaactttagcacacatccacccatttaaacagaacaccactacttttattggttttatattcaaatcttccaagaaatatttccttcgaggaaaaaaattctaagatgaaggaaaatgtttgaatgccactctataagtgatgaccacgtggctgtgtattcctgaagcaccagactttttctttttaatactctatcactaaataaacaccaaaagtagacttggctctttggttaggtttagttgatgatttaagttagggacatatatattgtgggtgcaaggcgtaatgaagaatgagcattagagatatttttaatgtgtgaaaaggagtaagtacagtaaaggtgatagttttagaaatacggctttggtcatatttttaggaaaaggtaaaattttgttttgatgttttactgtctctgaagaggaattctctaagccccttctcaaggtgccacaagtagtttagattggtctagccaagacaatattgtaggaagcagattcaacatctaactgttttaataccaaatacaccttaaatctggagcctgttcaggttggttctgggcaaagggcgatagcattgtgccgtccttcatatagagagactgtttaatctgtcacaatttaggatgctgaggctgaaactacagagacaagttttactcttccattttttggctcatagtaacggagacacagtttgtatgtgtgattgtgcgtgcatgagtgtgtgtgtgtgtgtgtatatatacatacacagaaatatttgtatttttgctcatatttatttgagtttctgagtcattcaaaagtatactaactaaccatggccagcctctgttgaacttttcaaaatttaagagatcattagcaattatgtaatattacgcattacaaatcagcctttctccccttcctggaccttctccttcataaatacaccagcctcaactaaaagggacgatctcaaggaatgtgttgagattgcctcgagtctctttctcctatggttctgctctaaaggtttacgcacttgcaaagcattcggctcactcaccagtcagcatgaactgataggcgttgtcagagatggagaagatgtggggcggggcctcctggcgctttttgcctcggtaggctgtcaccacctcgggcttatacacaggcagccacttgtaggggttgacagtgacacagaagagacctgaataggtctatgagaaggaaaaagaataagtacccaaagacctttcctgttatttgtgaaattaacttattaattgaatgtttttttgagacagggtcttgctctgtcacccaggctggagtgcagtggtgctacctcagctcactgcagccccaacctcccgggctcaagcaatcctcccacctcacccttccaagtagctggtactacaggcatgcatcaccatgcccagctaattttgtacgtgctttttgtagagctaaagtctcactttgttgcccaggctggtctggaaattaattgaattttaacaaaaaggagcactttaagtgagtactcttatttcttcaaggcatcagcttgaaaactagttggcaagttcaacaatgtgatagcagaatcctgagggaagtgactacaattcagctttcttattgctctcctcagggcttttcacagtgatttttacatagcagaagaagaagtacatgttattaaacacatgtgctatgaaacttttattgttttatggaaatggtttatattttctttgcagcattaagataattcaaatttatgagaacataaatttggacataagctaagtggccaacagtaagggaatggttaggtgaactatggtaaatcttctaagacaatttgatgcaggcatttaaaaaagtaaacatgaaagtatacagcaacactcaggaaatatttacaaaacgtttttaagttataaggaaacaggacacgaaatgatatatatatatatatatatatatatatatatacatcatgattacaatagggggatttaaaaaatctttgacaattggttcaagacaagcaccaactagttaaactggatgctgaccatcaactctaggtacacttgtataggtgttgcctagctaaataacagcactggctaaactatgcaaaaatatgaatatagtataataaatttgatttaaaaatatttactgcatgtttattatgtgcagacctttaccagacagtataaatgagaccagataaatgagatgatgtcccttgaggaatccccagtctatgtaggagacagtcatgtaaatgaatgatcaaggagaaacatggttagtgttaaggcagggacagaaaggaaaggacagaacatctcactgcttggggaagtgggagaggtttcatcgaggaggtgacattccagatagaagggaccagaacacacagatacaaattgctgttatttcaggggattgaaaatgagtgaaatttgtttttaaaaaaaaaaaaaatgtaggccaggcatgatggcttatgcctgtaatcccagcactttgggaggccaaggcaggcggatcatttgagcccaggagttcgagaccagtctgggcaacatagtgaaactctgtctctgctaaaaaaaatacgaaaaaaaaaaaaatagccgggcatggtggcacatgcctgtaatcccagctactctggaggctgaggcacaagaatcgcttgaacccacgaggcagaggttgcagtgagccgagatcgcaccactgcactccagcctgggacacagagcaagactctgtctcaaaaaaaaattaaaatagtttaaagtgttaaaacatgtttatcttttcactctggatgattctgcggctggagtggggaaaaggaatggggaaaattacctgtgattgaaatataagtagtaactgctcaaatgcctattgaagggtttctgggcaaacctagtcaacatggacagcggccttccccagctttggatgggaaaacaaggaagtgctggctgttgagctgtgctttacgatagcaatcatgaagccttttaactagttatgctgcaatgaaagtgaaatgggtcactacctgtgacctatttatgctcagtggaagaagcaggatggtagggtacatgaggatgattatacagagcactggcaggggacactcacgtagatcatccaggctgcataacgttctttgaggttgtacagcacagcaggctcatgcagatgagtcatcatggccatatcctcgatcttgtcatatttgggagggttcatggggaagacctgatcatccttcactgtcagagtctggtaaacaggaaagataaccgtttacattaattgagtgaccaaacaacaacaacaaaaatcaataaaatgtggcaagctcctgggattctactcaccgctcctccctcagtcttcaccgtcacttttcctccttctctgctctggatggtccctttgacaaaggattctttgggctccgccacaaagacagatgttttggcatcaaagggcctattctgggcctcaatgcgctccctttcagactttcggaggaaaggagcagcctccccaaaaacagccaattctgagtctgaactcatggctgctgaactcagaggtcctaaaggagataaaactttcacattagagagtctggattgccatgtataccaataaatcttaatatttattgtatttcataggcccagttggaaattccactagacaggtctactgttcaccatactatagttactgagacaaacataatcacaagaacgaaaatgcatcaggtggtctctgtgtacccaatgccgtatttagggctttgcatccactgtcttatttcatcctccaggactcacattctcattgggaactgaattacagtccagtgctgctgtcaagtagcttgtgaccttgggtatgtcacttgatgtttttgagcctaagtgactccatctttagaatagggattataaattctgcctttctaaattcacagcccatgatatatgtgaagatactttgaaaaagaggtttaaatgatgactgagaaagtaatttgaaattgttcaggccaccatttatatatgagatgtcatgaattatcatgtcacaaaattccatgtcttgaatgtaatgtagaagaactttatttcctcctttacctgttcagccagatttgttgaagttcagtggcttattggagattataattttgtttacctttttttcttttaggttaggtgcttagtatagtttctctgacataattttttgcatattaaatacagttcatcagtttaacccccttaaactaattagggataaaaacagtagccaacgttaacctcattcttctacatctaagggctccctttactattccaaattttcctttgaagcatgcaggccctgtttgctccgttctatgtgatctgtaggttgccagtggtatcagtagaatgaaaggtttggcaaataattctaccgcagtcattacatgatcaaattacttgaaactcatttgaatcgtctcttctagtctctccctttagaaatgcagtaagtagtgggagggcagattaatacctctattatatataagaaaaatgccacagcactcggcattgtgtaaggtgactttttacaagggctttaagaagtttaaagaaaggattgtcttacttccattttacattgttggacattatgtttactaaatgaattctaacagcaggatacatttttatcaaatttgagatttttagccagggaatctgagggtagactctttttttcctgcacagacaatatatttattcaaagcgattcccctgctcaaatgtcaccccaccaatgcttgagccgtaaatgaggatgtgtgcattgtcctgaaaggacagtcctccctttctcaccgctttcctgaagcacagttgttaaagggtatttactgagacaagcactttctgaaaggttgctaagtgacagaaatccatcccagagcctcttgcattctcctccaggaactggttagtccaaatcttaccttgttagcaagtgagaagatgtagcctgggagtgagacagttctataaaagaaaagggaaaagcacttgattagttgaccaaaaagagggggaaaaaatcccatttatggcatggcttgctattgtaaacagaagtaacaaaattcatagaggtaaaacgtgcagttccagaaggagcagtaccagaactagcagctgctgctgacactgggcggtgtgaccagtgtccctcttgaaaggcccgtcctgctcccacttaccttggagctttttaaagcaggacgagtcagcctcattccaagggctcttttatatggatagctatggaaacaatgcagctgcctcttctttcttaagtcaaaaggaattgtttggcaaaatacctcttggcaatctagcgtccccgcataattctcattcatattaagaatggttggatataattagaaatatttttcttattgagtatgtggataaatctcctatggataatttgagaagatgatctgaaagagtcaagctggtggataaaggcagtggctgggcagccaggatacctggcttccctcggaacttctttttggctttgctgggcacagcattcgggcttgcctcgcatcactttcgcatatttcacgtgttaagtcacataaataaaatacaaatatgtattttaattttgtgacagttaatttttacctgttggtcctttctttccagccctgcaaaattaagcgatgtgccttcaacaacttaaagagacagaaggtcctctctgttattccaatattcctgtagtttcaggaatttccttgctcgctcacctttttgcttttgccaaagttgttccctctacttagcacaccatttcctgtccccctacccatttgacttgcctgaaataaaaaaggttgaatattttctagtagcagaggtgtttttagagagtacttttcaacattttttcgtgtcatagcccgctgagaaaaaaatgacaatattagtgtagcatgctagagtaatgtggaagggatttgtctatatctgtaaagggcttggggagaatatttttaatttttttacattcctttatgtaatataaatataataactatgatacacatagcattaaggaaaatattaaatactgaatatgtcggaaacttacaaataatatcttcttgaaaatcctaaggaaaaatttgagctatatcctacaaataaaacttgtttgtttctgactttattcttgaaatatgacacaaatttccagatcaaattttcaaaaatgatacaaacagtatctgtgttcttgataattaccatagcggggatttttgtccaagaaggagggatgaaaatggaaaaccaagtaatttacaactgttggagtattttaaaaattcaccagttcttctttctccttcattgaaaaatataatgttgaatattctcgtacagtgaaaataagtttttaatccatttaaactctctctttcatatcaaatatttcaaaggataatgaagctctaatcttcaaaaacttcatgggttaaaggagtcatcagcattggtcaaagggcacaccagtcacaaatacacacaagtacctgatctattcaaagtctaaggtttggagctattactgtgggctacctcttccagtacaacctacttagccttctggcacctttactctggctggatgctctctgggctgcatgccttgtcccaggcatcctggaacaccaaccctcccagcaattccaggggtctcttgactgcagaagacagcattacattctcagctggctgctgaagtccttcttggttccatccagcacatggcaaataccaccattgtgcttgcctcctgtaggaatcataggttatgctgtcagactcgaatgcagcccagtcaacactctgaggaacccttagtcagccttctcccagctaggagccacctcccaaggtccccctccccatccagccattctgagactgaagagatcaacattttatggcacatcagttacctttttgatgccaagatacactggttgggaagctctgttttaaggtgagctgttgagctgtttttccaaactaaacagccatttttagtgcccacagcaatagtttaatattctcttgttccatctctgctgccaatgggcattttccttatgttttattaaatagttcttattttatgttatttacaaaatgatcttcacttttttttttttttttgagatggagtctcactctgtcacccaggctggaatgcagtggcatgatcccggctcactgcaacctccgcctcccgggttcaagcaattctcctgcctcagcctcccaagtaggtgggactacaggcacatgccaccacgcccagctaatttttttgtatttttagtagagatggggtttcaccatgttagccaggatggtctcaatctcctgaccttgtgatacacccgcctcggcctcccaaagttctgggattactggtgtgagctaccgcgcccagcctgatcttcaattttaagtcaatccatggttctatattctgtttcctcatttggtaaactccttcagtgaatactgtgttctataggtagccgctgtctaatacattgtttttgactataaagaagaaaatgcaaagccttgttcccagtaattaagagacacaccttaattgttcccgtgccacttggctcaggatctgtgactgttaaatgttctctgagaacaagagcttaaggaatatgtcattcgggatcatcttttccactatgtaaacaggtcaaagacatacattcactttgtgtccttttcttgatttcattgtatttttaccactgctgcaataagtcagaggctttctactttgcattgctcacacctgggactatctgtcacattttggtgtggtgacagcttgggaatgagctaatttaagagtgctgatactctctctgaatctccttgcattgtctatgccatgcaaggagattcagagagagtagcagccactgatctggtcttcaggaaggttacaatctgagaaatcgggagagcactaatagatggctcaagtcaccttcagaacaacgtgacggcggcctttaaaagttacagtgtgtaaatcctttgcagaaaaggatccatattttctgcatctacttgatcctcatcaacacttaggatagtgctgacatgtagaaagtgctctgaaattctagtttataaattctcagatgccctgggtttctttatcctaatcattcttgtccccaataactgaaattgggacctggatttaacttttggctgcataccagctggatatccttggaaatttactaaaccttctcaagactcagcttcctgctctataaaagggataagtgctacctcataggggtttgtgaggagtaaacaagacacgaaagtgcttagaagctgaaaacagtgcctggtacccatcactcattcaactgatattaacaattgtgattactattgccccccacagtttgttagttcttattctgaagtctctgcagaagtgaaactagttttctttctgatctctataacaagacatgctcccttgatcatttcagtcactcaataaacatttgcacagcatgactatacggcaggctctcgggtaaactccccactgccactatggaatgccctcctctctttcatattattgtttcattatatcaaaatccagctcagctcttattcagacattttctcaattattccatcagatagagaaaaggcagtttggcctgcgcagagagacaaactggcattagctgttacatgaagaaaggtgtggtgtaagaagaggctggtcgtggtggctcacacgtgtaatcccagcactttgggagattgagatgggtggatcacctgaggtcaggagtttgagaccagcctggccaacatggtgaaaccccgtatctactaaaaatacaaaaatgagccgggtgtgatccctggcgcctgtaatcccagctattcggaaggctgaggcaggagaatcactttttttttttaattttttaaaaattttattattattatactttaaattttagggtacatgtgcacaacatgcaggtttgttacatatgtatacatgtgccatgttggtgtgccgcacccattaactcgtcatttagcattaggtatatctcctaatgctatccctccccactcccccaccccacaacagtccctggagtgtgatgttccccttcctgtgtccatgtgttctcattgtccaattcccacctatgagtgagaacatgcggtgtttggttttttgtccttgcgatagtttgctgagaatgatggtttccagcttcatccatgtccctacaaaggacatgaactctacattttttatggctgcatagtattccatggtgtatatgtgccacattttcttaatccagtctatcattgttggacatttgggttggttccaagtctttgctattgtgaatagtgccgcaataaacatacgtgtgcatgtgtctttatagcagcatgatttataatcctttgggtatatacccagtaatgggatggctgggtcaaatggtatttctagttctagatccctgaggaatcaccacactgacttccacaatggttgaactagtttacagtcccaccaacagtgtaaaagtgttcctatttctccacatcctctccagcacctgttgtttcctgactttttaatgatcgccattctaactggtgtgagatggtatctcattgtggttttgatttgcatttctctgatggccagtgatgatgagcattttttcatgtgttttttggctgcataaatgtcttctttgagaatcacttttgaacccagggggtggaggttgcagtgaaccaagatggcgccattgcactccagcctggtgacagagcgagatccgtctcaaaaaaaaaaaagaaagatatgaagaaatgagggcccaggctagggagttggtgatggaagtagataactgatcaagaaattggttaacaggtgatctttggagcggggaactgaatgttaggtaacttggtggaggggagactgacgtttcataccataccatttttgtattttcaaaattttatgctgggtgcatgtattattgctttaaaaattaaaagtgatgatttgccaaaacaggatctcccttaaacattggaagaaaagaacagatgggattaaaagaagaattaaagagatgccagattaagccctagaagagtcaggactcaagatgaaagtttcccagtgactgcttctgtgttttttccatggactaaactccaggcccatcaatccacattgttaatgagtgttgatattgttttctaggaatgcattggttttctgtttcaaacttggtacctttgcaccagtaacccacacgtataaagccccatcgatagagagctctacttccaaatgtctagtcatagaactttctgaaaatttgctttataaagaaaaaaattggctagtaagaggcctgtaggagagctcataatttgaagttattgagagacataattcagagccacttataatttgaataaaaatatatacatatattcaaatttatgtacttatttaaatgtatttatatataaattacaaatataatttttatcatatattacattactctttttagttccagatttagctttcaaagaatacattatttagtcctaatttgaaataagtggaaaaaggaaaatttgtatctgtttgcactcatgggtagaattgtacaggaagttgctggagggggtgctatatcaaaatccaagaatccaaagacttgctgtatgtaaagcattctattaagtgctcaggagagaggaagatgggcctagctctcagcagttccaccagcacaaaacacataatctgcatgtaaataagggagtttggtgatccttcgtggaaaaatttgggagaagcaaaactaactcccttaagactaaattaacgtttgtttgtttttctatccacaaaagtaaaattggtacatggatattctagaaatttggaaaaagcacaacaaaagaatgaaagttaagagaaatgatttcttactagtgagtgtagaaaaaaatgcattcatttctgcacatttcaacatttgcttaccatctttcattaggttaatttgattatgcaattaagaggcacaatcagtatgtatataaactctatagtcctcatgcctgtcaaatattaggcatcaatacgtgttggttggatgacaaaggaataagcgttattctgataatgccactacttacctggcattttatagcctgtaaagtgagcctctttcaacagctctgaagtacggatagcacagataaattctcttctcttctttgttttctaagaaaccatgatctaaagggttattatacggcttacctaatcagggtggagctcaaagatttcttgccccattctccattgattttaacgcctaatatatttaaccctgagtactgttcactccagaattgctctaacgcctttaggttgactattaggatgtgcattcataaactgctagccttactcaggcttcttacaatattgtgaggaagataaaatgataaatatgccaatagttattccaggatgtagaaaatgttaagtgtaaatccccaaaggagagggcattccccacaaaccctctgctatcctgtttgctcagtctcttcaaaattagcacactgactgtgagagtataggcagatttctttaacgaagaagtagcattttgttgaaggatcagggaaggccttgtagaagtgtcatctgagatggtccatgaaggaatgggtaggatttaacagatggagatccaggaagaaagaagttctaggtgcaagaacagaaactgaaagaactgaagtggaaggaaaaaaatttgaagtctgtttgaggaggagagagcagtcttgtctgactggagtctaacataagtgtaaggaagaagtctagggagacagttggaaccagatgcatcagaagctgttgtcaggcctcactcattaagaaggaatgttctggcccagaactccaaatgaggctgaccagagcagcttctttttatctttgttctcagaccacagaccccttatttccttatttttcactcggttctacactctcagattagttttccatcccccatatccacacgtccactttggcctcctcctttggcctccttttgctcatgatctcccacccttgaccatacttgatcctattagtcagggcacttaacccctctcctacttctgtgaccaacgtccttcctcctgctgatgcctgtagaagctggaaacagttatgggttgtttttcctgccctgccaagcccactcagcttgtgacaacaacgagccttgaatgcttggcaccagggtttgacttgaataaaatatttaaccctcttggcttgggcacggtgactgacatctgtaatcccagcactctggaagaccaaggtgggaggattgtttgagtccaggagttcaagaccagcctgggcaacataatgagaccccaatctctacaaaaattaaaattaaaagttaacccatgaatatggggctgttagccaaaacaacacttccatgaatttagaatgctgtatcattgaggaccaaaattatctcatgcttactttaaaataaaatctaccaatattttttgaggaattttaattttacttgactatggtgctttttaaagtcaatttttaggaatggaaaaagtattcaattaacccaattctgttttccttctctcagttgcaagaataaaaactggattaaaataattttcatcttgtcctgccaaaattatgcccccacaaacaaacaaacaaatgcaaacccaaatctcaaaagagaaaagaaaaatagaagtatgaattagggtgggaatggaattctcatggttgagggaggaaagatttttgctattctgtgagctggacattttaaagaaacccaaatgtggatcaacttcctcaaaactgctgctttttctttgtggttttggcttgtcccaggtcaagcaactggtccagtggacaggagttgattaaaacaaggctgtgttccaaggctgaagagtatttttagatcttgaggaagaattttttttttttgaaggaaaggatggtaatgtcatccaaagtactagtcctgtgcagaagctgctacttggcatgtctcaagaagcacttcaaaaggaatgcggccaaaggccaagcttcaggaagccaaatgctggagacccagttgttcttctggtctatttggaaaacatgatggcagacattttcatggattttctcatcgtttgccccttttataaaccttcatgaacacaggcatttgctttgttttgattgccctgtggaagactctagcttaatgttctaaattatttcttctttgagcaataagaacaaaaatgatcattggaaacccccaagatatatcatatccttgtaggaaaatattagctggccaatcttgaacagtcttcaaagtaaaaattatgggaagaatggatgaaacaaagatcagatgctggcgtgtgtacatgtgggtgcactgtgtgtttatgtgtgcccagcattcatgcatgtacttcatgtgggtgcactgtgtgtttatgtgtgcctagcattcatgcatgtacttaactaaaagtgccctttgcaattaggagaaaggcaggaacggtggagctacttactgttcttggatgattcagactcatcagggggtagctgggtgtttagatagataagtgctccctgctaagatcttaccaaagcaaacgattctaacttggcattcaggaaaatcaataagtggaataaagaaactgaatttctggaaattatcttcaattgaatcgcgtgatgttggctgagctactcaggtcccgcaagcaaaaacttaggaacagaaagtttttatcagctgactgaagtgccattgcttggtgcatgactgtattatagtttcaaagtgttgatgcctataaataatatttttaaatatctacaactactggctgggcacgcctgtaatcccagcactttgggaagccaaggtgggtggatcacttgaggtcaggagttgaagatcagcctggccaacatggtaaaatcctgtctttactagaaatacaaaaattagccgggcatggtggtgggcacctgtaatctcagctacttgggaggctgaggcaggagaatcgcttaaacccaggaggcacaggctgctgtgagctgagatcatgccactgtactccagcctaggcaacagagcaaggctctatcaaaaaaataaaataaaatatttacaactactgaaatatgatatgaatatctgtcttggtgactgtgatggttaatttaatgcgtcaaattgacggggccaaggagatatagatatagatacacacacacacacacacatatattcagttgtttctgtttctctggagaaccgtgactgataaagcgacaaagtcacaagcactactactagtacttgggtttgtttcccacatcatatttgaaggaaatgaactgcaggttaattgtttcttaataacttcatattttcccagtccaaaggctgctcacttttcaagaaccagcagatttctccacccattacaatccccactgagactccacatttctgaagcctttgtgtccatataataataacacccagcaagctgcttcgattgttcataacatttcaacgttgtgtttcatctctcctttatcggtgtaggtttcttggaagcagggactggacttctgcttcttttgaaattccctgcctcagctgcaaccagcatactgatgggaacctggtattccagtggttctcaaccctgaacacacatcagaataacctgcagatgcttgggttctatttcccaggccagtggttcattaagtgtgatccccagaccagcagcatcagtatcgcctgagaatttcttagaaatgcaacttatcaagccctacctacaaccaacacaatcagaaactctgggggtagggccccacagtctatgattttggaatgcactaaaatttcagaatcactgccctaaggactctgattctgaagaaatggagcggaattcagaaaacttcatggaaaaagtaccattacctggtaaattccatgaggtcaaaggtagggtccaattttgctcaccgttatacctcaagggcctgtcttagtgcctgacagatggtctggactagaaactatttgttgaataaaagaaagaaatgcaatttgtgaggcctacgtattgtgcaactatatttttcagtgtctgctgacttttatagaaattagatacaagtcctttgaaagataaatattccctttgaaggtgccatttattgcaagacatcaattatttaacaaatgatgcacttgttgttcatctagtagctccaactagtgttttggcttatgagagagttttgaaaaacaagcaaaaaggtcagcgtttagaaacctaaatgccttcaccaaattaaaggaaactttgcttttttttttctctttttgacagagtttcactcttgttggccaggctggaatgcagtggcacgatctcagctcattgcaacctccacctcctgggttcaagcaattctcttgcctcagcctcctgagtacctggaattacaggcgcccaccacctgtattatttgtattattactagagacagggtttcaccatgttggccagcctggtctcaaactcctgacctcagaggatccacccaccttggcctcccaaagtgctgggattacagacgtgagccaccccgcccggcctgcatttttttgttctatcaggagcacttgccgcgttgagctctttggggttttctgatcttcttgactacaggaaggacaatatgagctcttatactctacagaataaaggaagaaaattcttctgcgtttcaccttcaaaatataggtagaataaactaaagctacagcagactacgatttccaaaagaccattatgtatattcaaatagcaagttgtcagatagtgtactttgctctttaaatagcgtgtcattgatgcattgattctactacgtgcaaattgtggtgtaagacaaaacagagaatgctgaaaagtgttccttctctcaaagagctcacaacacagaagagaaatgagagcagggaatacaaataactacagtccctctttatcctctttagtactcgacagagccctttccaatgtttttctttatttatctgtttgcttatttgtgaatttgttgtcttccctcctcactagaacataagtcaaggaaatctcatttaccaccacatctgactggcactgagggtatttcctggtgctggtggacacaatcaatatttcttaaatggaatgctggggaaggaaacac[223 bp omitted]gaagcaggagaataacttgaatccaggaggcggagattgcagtcagccaagatcgtgccactgcattccagcctgggcgacagagcgacactccatctcaaaaaaaaaaaaaaaaaaaattagatcccactctgaggcatctattttcatgttctctgatgaggacctatgctctggattcacatggatctgcggggttcaagtcttggttctgaaactcgctgctgtgtgcttttaaccacattgcttaacttttgacagtttctgctgcccctccatcgtgatacttaactctgtattgcctcacctgaagtttaatttctctctaagtctgttatttaagataagccaaaaaatgtcccgtaatattgaaaaatatattttactaattccaaggactgctcgcttataaccttgaaattacaaatatttttatgagaaactatacatgttacattaaatttattttcttattgttatttttgtagaaagctgtgttagctccctcaaagtggtaaactaacttttcataagaggataattttacccaacaaccttgtgataattaactcaccatgacttccaaatatagctccaatttacccaagcattattaaaggacttttaaaattaggagcacagctaaaggaatttcctccttgggtttacaagtaaaattaaagtgactgagaataacttcaaaacacaaggcaagacttatttaccttacgagtattattggttagtcagttgaagtaattttaaattccattcttattattttaggcttcaataattctaacaaaaagtttttatgtgtatgtataaatatatatgttatatttatatagtcactaaataaatatttttagaaccatgtttttcaaactttttcttcccattgctgagatgagatggtcttttctatgagtttttctaaataagctgcaaggttctttctcatgtgttctgggagatgtatcttctggtggtgagatgcctagccacccacctgggacagccatgagacctggtgagagaattgctaaatcatgaaactctccaagcttccaatgccctatatgtaaggtcagaattgtaacacctgtcctgcttacagatcaaataaaaaattgtgtataagggtgctgtgatttgactgtgtcctccaaagttcatgtattggaaacttaattcccaatgcaacaggattgagaagtgggatatttaagaggtgattaggacacgagggcccttccttcatgaatggattcagctgttattgcaagagtgggttcctaataaaagaatgagataagttggacatcttcttcccttcttctctcctgatttcctccagttctgtcttccacaatggaatgacaagcaagaagattttcagtagatgctagtgctttgatattgaacttcacagcctctagaactgtgaaaaataaatttctcttattcataaattatccaatctgggatatactgttataacatgaaacagcgaaagacaaagggtttcataagtggaaaaactatatatacctatgcatgtgtgtatgtataacagcatatatatatatatatatatatatatatatagtagcactctatcagcataacactaaacactatatatgtataagtatatatatacatatacagacatgcatcacttaacaatggggatacattctgataaatatgtcattaggcaatttcttcactgtgcaaacatcatagagtgtacttacacaaacctagatggtatagcctactacatgcctaggctatatggtctagcctattgctcctaggctacaaacctgttacgtgcatgttacgatactgaatactggaggcaattgtaacacaatgggaaatattcatgtatgtaaacatctaaacgtagaaacagtacggtaaaaatatgatataaaagatttaaaaatgtcagaccaatataggatacttacatgaatggagcttgcaggaccggaagtcgccctgggtgagtcaatgagtgagtaggagtgaacgtgaaggcctaggacattacttactgtatactattgcagactttataaacactctacacttatgctacataaaatttataaaaacgtatttttctccagttataaattaaccttaactcaccataacatttttactttataattttttgactatttggtaatagcacagcttaaaacacaaaacacattgtatagctttgaaaaaaatattttctttaagcttttttctatttttaaaattaatttcttttgacttttaaaacttttttgttgaatactgagacataaacccacacattagcctaggcctacacaggatcattaatatcactgtctaccatctccacatcttgtcccactagaaggtctacaatgtcactaggcaatacaaatttatcagtgccattataatcttttttttttttttctgagatgcagtctggctctattgcccaggctggagtgcagtggtgcaatctcagctcactgcaacctctgcctcccgggttcaagtgattctccttcctcagcctcctgagtagctgggattacaggcatgcacaaccacgcctggctaattttttttttttttttttttttggtatttttagtagagacggggtttcactatgttggtcaggctggtcttaaactcctgactttgtgatccacctgcctcggtctcccaaggtgctgggattacaggcatgagccaccgtgcccggccagcgccgttataatcttatgggaccaccactgtatatgtggtccattgttgactgaaacgttatgtggtgcatgactgtatacatacctatattatataatatatacatatatgtaagttattgctgctgatattctttaatggcttgcttttataaatcccacaggaaatggttatcaaagcatttcagtggacctagtcattagttattcactctctaagcctctgctagtaagactgaatatgattggtcttcatatttgaaagcaaagatattcttttcacagtttaacactgtcttgctttttgcttttcttttttaatagaaagtattggaaaatacaaattggtaaacacttactgactctgaattttagctagaagaatcctcttattccttgacaactatttcttaactggggaactggagccttggatggcaaaaggacaggtctgagcaaaatgccctgctgtccaagagggatctggcagtgacctagcacaaatgtcccttctcttgtgacagcctctcacagactccactaagcctttctccagtcggacatggccctttattcagacctctttctggtgttgactatgtggtggggaagttacttagggttttttgcaataagtaataccttgctatatgcagtgataacattgtaaaaattaagtatataagcatatagagttaaaaagtgaatgtcctcctttccctctctccccttcgtgccactcttagcagtttggagcatggcctttcggatcaatttgtatgcagttttaatatgcacatacaaaaacatgtaataaagagatcattctgtacattttgttctacttctcaaaaatcttttcatgtccgaacatatattgatatatctattccgtaatataaatatgttatttaacttccgatgaacattcctttctttctcttcttctttttgctattacaaacaatgcaccaacaaacactctgttctatactcaaacacatacacataggcacatatgtatctggaggatacttttataatcttgttttatacaattggttgtttaatgcaggtaaaatttatttttatatgtaacgtgatgtaaaaatttaactttactttaaaaaacggatatctaggccaggcgaggtggcttacgcctgtaatctcagcactttgggaggccaaggtgggcggatcacctgaggtcaggagcttgagaccagcctggccaacatggtgaaactccgtctctaccaaaaatacaaaaattagccaggtgtggtggcaggcacctgtaatcccagctgcttgggaggctgaggcaggagaatcacttgaacccagaaggcggaggttgcagcgagccgagatcgtgctgggattacaggagtgagcaaccgcacctggccgagactgttctctcactcagcaaaatgccctgagattcgtccaagttcttgacagtatcagtagttcctatttttttttggtaagtagtattgcactgtatggaggtcccacagtttattcattctctcctgctgaaggacacttaggtttttgcagcgttggatcattatgaatagagctgtcttaaacattcatgtacaggtttttgtatgaatgcaagttcatttttcttgagtaaattccaaggagtggggttgctgggttaaatgataagcataggtataacttcataagaaactgcaaaacatttttagagtagctataccattttgcattcccccagaggtgtataagagtgccagctcctcgatatccctaacagcactcaatatggtcagtatatttttaatttaatcattctgagcagtgtatagtcgtgtctcacgttggttttaatatgcatttctctaatggctaataatgttaaacatgttttcatttggtaaagtgtctgttcaaatcctttgcgcattattaaaaggggctatttgtctttttacttttgaactttgagagtcctttatatattctggatacaaatcctttgtgagcagggacatcttcatgggagtgtgacctgtgcagctgcacagggttccacactcaaagggacccagagctttgttcaatgttctacagttgcagtcttgaaattcttaataatttttcaaaaaggaggtcccacattttcattttgtacttagccccataaattacatagctggtcctgtttgttggatatgcaatttgcaaatatacgttcacagtgctagcttgtctttccatacccttagtagtgtttttcccagaacaaagttttcaactttgataaggtccagtttatcaattttttctttgttggattgcacttttggtgtcatgtccaagaactctttgatcatgaagattttcactcctgttttcttgtaaaattgttattgctttgtttcacattaagatacatcatccatttggagttaatttttgtatcgtttatgagatttaggttttacattgaaactttgattggcaagagatttaagttatagattaatttaggaagaactgacatttttacaatgtagcatctttatgtctagaaacatgataatactttttttatatattcaagtctttgtgtcctataaagttttatggttttattcctatatttcttgcacttttttcctggtttattcctaggtattttgtacctttttttgctatttgaacgagatttgttttctattatatttactaattcattgtagtagatggattgaagttgaaaagaaataactgaagatgaattgaggttgaaaagaaaactgttgttttggggtgttgattttgtatagaactcgttactaaaggggcttacaaactgtttgcttttaggcaggttccggaagagaccgtgctttcctcctcacttcctgcctttcccttataaaaactaggggattggagtggagtggtggtcagttatgagagttctgctgaaatgacacctctggacagcccgagggtaggaaaagggtaccatttgctgttaggtacttggtgccattgttctcagctgtgggttttaagagctaattgcatcagaaaaaaaataagataaagataaacacattttatcagtagatactcattcagctgcaagtaacagactagtttagtgacatttgcttttaaaaatgtgttttatttttttcacataacaagaaatcttggggtagaccattgctgatgtcagctcagtggttcagtaatgccactaggaacccaagtttttcttttctttcagactttttttccaagcaaactttttgttttggaataactttagatccataggaaagttgcaaagacagtacaggcctctcacatacccttcacccagttttttgctcatgttaacatcttacataactttggtacatgtgtcaaaactggaaattaatattggtacattactattaactaaagtacagacttcattgggatttcatccgttgttcctctcttatccttgtcctgtttcagaatctaatccagggtatcattcgttctaatgtctccataggcatcccttggctgtgacagtttcttgatcttcacttgattttcatggtcttgacactttgaggactactgctcaggtattttgtagaatgtccctcagtttgagctcatctggtgatttctcataattagactggagttgtgggttggcagggaataccactggggtggagtgccctactcattgccaggtgtcctgatatcagaaggacttatcactagtgatgttaaccttgtgatagtcagctggtaatgttaaacttgatcactgatcttttagtctttttattatggagaatttgaaacatgcacaaaagtagagaaaacaatatagctaacccctatgtatctatatccagtttcaacaattattgattttatttcatctatacctccatctactttcccagtagcacccctgggctattttgaagcaagttgtaaacattacatttaatctataaatatttcagtatggatcacgaaaagataaagactcctagaaaagtaggcacaatatcattagcactcgtaaaatccctggctatattttcaaggctatttgtattttcccactctgcccttttcggcatgtggctctttatccttgctaacagttgtgagagagcttctctgtcttcagccgtcacatctaagtttaaggccaaacactgggaggcaggatagcaaaaagcaaaaggtttcccagatccttttgccccttacccttacaacccgacttccagctgtatctcactggtcagaattgtatcacgtggataccacaagtaccaagagaagttggaaaagctagcatttggctttccaacctccataattgaggatgacatgggatgatgaggttgggaatagatgcggagtgagccaacatagagtatcgttcacactaacttggggaaaagagaaacttcacttgacacatttctccattctgtgaaaccagtccttagggaagagagtgggactggtggaataactactgaatggccataccatagcagcacttgtgttctcctgcctctggcttggtgatgcctaaggctgggacctggctgggcctatgagtggaggctaaggctccagctgtaggggctggaacaatgtggggctgcagccagagagccgttttaatttgacttcaatgactcaaagatgtagttattaaagaatgcatttcaggccgggtatggtggctcactcctgtaatcccagcactttgagaggccaaggcaggtggatcacttgagatcaggagcctggccaccagccagcctggccgatatggtgaaaccctctctctactaaaaatgcaaaaattatctgggcgtggtggcacatgcctgtaatcccgctacttgggaggctgaggcagaagaatcacttgaaccggcgtggcggaggttgcagtgagccaagatcgtgccactgcactccagcctgggtgacagagtgagactccgagagagaatgcatttaacaggacataaattctaaaatcaggataatcctagactaccgagtagcttaagtataagtttagagcattaccaaagcaatgactctacaagaaacattgagttctggtgaatttaacaagaatttttcaaaataaaaaaatgtttagaaagaagctgccaatttttaatgaaaatcattttattttacattatttgacatacttttaaaaaagaaaaaatgtgccaattaaactctgaaatgccattgattctaaggcacatcctgactttagaaatgttaaaatgtggaaaaaattttgtcttgatattgatgaaatatggtattttaatttttaactatataatacaagtaaagtttggattctatgtcacaatcatttttaaaaattgttttattgagttataataaaatcagtgagtaataagatcaatgaaattccacttatgtatacacctatgtaatcatcatccagattaagatttaaaacattttgctatctcatagttttcttgtgccctgtcccacttaatctctattcacagaagtgaccactctctgaattttttcaccgcaaattagctttatttgttctgggatttatataaatggaatcattcactttcttctcttttgtgtctgactccctttttttttttcttatgtccaggatacattgttaagggagaaaaaagcaagttatcaaaacaattgaaagagtattatcatttttgtttaaaaaaccacaagtagtctgtatctataagtgtgttcctatgtatattacatgtaaggacagcgtactgaaatggggagctatgaacaggccaacctagacctccatatttgaaaattgtcacttgctccttcccctccatgttactcatctcgttcccctgttctgcattttcatttttcatagcacttaatgtctttttacattttatatatttacttatttattatgtttattatgtatcatatgtttctcctcctttccctagaatgtaagattgctcatggtaagaatctttatctagttagtatttggcacatagtaggtgctcagtaaatatgtagtgagtaaatgaatcaaatggtattggagtaaggtgaaggaaaaacactttttaattaatttatcatagttgtatgtattacaatgtataacgatcaaatagggtaattgggatggatatccatcacctcaaacattgatcatttctatatgttaggaacattacagttcttctctctagctactttgaaatatacaataaattgttaattataatttccctactgtattattgaatagtggaacttattccttttaactatatttttattctcttaaaccaacttctctttatccctacttcccttcccagcctctggtaattcagcataatgtttttgagacttatccatgtcgtggcatatatcagtactttgatcttcttaaaaatcatgga[217 bp omitted]gaggcaggagaatggcttgaacccgggaggtggaggttgtggtgagctgagatcgcgccactgtgctccaccctgagtgacagagcgagactccttcccaaaaaaacaaaaaagaacacagtttgtttattcattctcctgttgacagacatttgggttgtttctaatttgttactattatagaaagagtctatgaacatatatgtaagagtctttgcatggacttatatttttatttcttttggataaatagagtggaattgctgggtcatagggtatgtatatatttacctttataataagttgtcaaacaccttttaaaactgattttatcattttatagttgcacctccaaggtgtgagaactccagtttctccacatcctcaccaacactaagaactgttagtcttactaatttcagctttagctttatctgctaggcttaaagaagtatctcattgtggttttaatgtgcatttccctgtagactcattatgttgaacatcttttaaggcactcttggccatttgtttatcttctattaggaagttctcttttaaaatctttgtctattttttaaaatggcatatatatgtatatgtgtatacatatatatatacacacacatatatatatatatatatatatatatatatatatatatatatatacacacactaagttctttgtcagatacatgttttgcaaggagcaatcacttaaatgaagaaaagccaataaggttgaagcaaactgtgagactcaagtcaaactgacatttactgaataactaccagatagcaggtccttcagacccaggctttcccctgattttcactctgccgggcatcattttcttgatttttttcactatgctactaaagcctagagaggttcaataacttgttcaatgctgcccagtttaaagaggcagagctaggattcaaaggggtctgtgtgaatccttccccttaaaagaagcacacttatattgggtgccctctgtttttccttttatttaaattatatagaagggacttctattttttttcaatgcttagcctctagaatcttaatctgtccttgaattagggctagctgcttagtcctgattaatttctaataaggaactaactagtcctttaatatgcccctgaattagattatagggaactctggtgtgggagattaaaatctgacaccccaaagtacgcttcttttggcatatttcaagatggctattcagaggggctgcagacacaggaatagctctgaaaagctatccttttgtgggggagatttgcatctgtagaggaaatctacattagtgaagtaaacagcggatgcagaggctttctctgagttctccttatccggatctaggagagattaactcagaggaaaaggagacgaactctgacattttaaaggtctgacagagaaacttgtacatagcctaccatctattctttctgaggactgtcagccgagtggcttcatttgcataagacaactacttttgtttacagtgtatttcctccctcaccatcccatgacctactgtcacctccttctgggagct[148 bp omitted]cccttttctactaaaaatacaaaaaaattagccggcgtggtggcggtgccagtagtcccagctactcgggaggctgaggcaggagaatggcgtgaaccggcgaggcggagcttgcagtgagccgagacagcgccactgcactccagcctgggcaacagagccagactccgtctcaaaaaaaaaaaaaaaacttcagtcatctgaccctcccttgagtctcatattttgagtggcttctatatacatgtgcttatagtaaatttgtatgccttttctcccgtttatctattataattttgttttgtaaatttaaattaccaaacctttaaggcggggggttcagagaaggaaaattcctttcacccctacagtgcattcataaaaatggcaataatccaggataaggagaaccaaaaaaatttttaaaaggtgggaagagggttccaaagcaagctgagaagagtttgtgtatagccaggacaaaaactggaagccagtgaatccccaaaagctgaaggtcaagacagagcagggctataaaatcaggaaagagaaacatacactcagaggtgaaaagaccatgaagttcttgagaagcccaccagagacagaaagcatttctattttttcctggtatagacctacaatagccatccccaaaggcaaccactcccagatctagaagcccaaggactctttcagttcaagaacttgctatgcctggcagcttccatcaacatcgatgagttttaaaatcttttctaaccctggcttcttaccctgcagttaggacatcttggttgtgatggaaattcaaatcaatgtaatgcaaacaaacaaaagtattctggcttcaatcttgggattaaaatgacacctccaggaattgctctttttctccatttcttgactgtgcttttctctgtattggcttcatacctgcaacaagctccctctctgtggtgggaaatccagttcgtggcagctctaggttttcactgtcctgatagtctaaggaaaagagaaagacttttcccaggagttccggtaccaattctggaagggctctgattggcctggttaatgtcacattttcatcactaaataggattcccagataaaatagagaactcccagttatatgtgaatttcagaaaaacaaattttttttactataagtatgtcttatgcaatatttgagacgtgcttatactaaaaaaattgtatttatctgaaattaaaatgtaactgaacatcctgtatttttatttgctgaacttggcaacctaattcctatgccaaccacctgtggccaaaaggatgacagactcctgaatcctggagattgagtcagtctcagattgatggggactgggaatgggggaagggtagttgcctaaagaaatcctgagcagattaaaagcttgtgcctactatacttgctgtttcttcctgtactcccaattttgtgtagacttttccagatcatctatctcatgttaaaaactgagataatcaccttcacttccaaatgtgtatttttttgacaaactgccaattattgacaacagattttttctccattcctctcacctctagttattgaatttacaagtttggtgttctttcatttcttgattttcctttggtccattaatccacaacttgaaaacccagacttgtgtctcaccaagtaaattcctacattccagaagctgcaaaatttgactcaatgacagtctagtgctagctcaaaggtgacttggggcagtatctgagcaagcaatatgaacctggaaattcagatgcagcagatttgctgatttgaagagatcattccagtttttataaaaatttcatatacttattattttatgaactaatgtactgtcatagtaacaaagtttggaccttcgctggaggagaaggggatgagttcaagaaattttcctatttgtaagcactactatttgtttgttctgtatcacattgccatgttctcacttgtatgcctcaactgtaaatatgcatatctgctttattagtcacgattctccaaggagtcaaacgcacgtgtgcacacacacacacagagggaaagcgagagatttatttgaaggaattggctcacactgttgtgaggctggcaatttgaaatcagcagagcagggttagcaggctgaagagccaggaaacagttgatgttgtagtcttaagtcctttggtgacttcagtcttttgagaccttcaactgattgaatgaggccctcccacataatagagagtaatctgctttacttgaagtctactgatttaaatattaatcgcatccttaaaaaatctctttggcccggcatgggggctgctgcctataattccagcgctttgggaggcaaaggtgggaggatagcttgagcctaggagttagagaccagcctgggcaacatagtgagaccccgtctttacaaaataaaaaattttagccccaggcatggtgcacatgcctgtggtcccagttacttgggaggctgaggcaggaggatcacttgagcctaagaagttgaggttgcagtgagctatgattgcaccagtgcactccagactgggtaacagagcaagaccctgtctcaaaaaataaaaataaaaatcccttcacaacaatgtctagactggtgcttgacccaaaactgggtactggggcctggccaagttgacccataaaattaaccatcccatctaagaagtcattactttacgtctaattgtgtcaatgtatatcattgtcagatcttccttcaatattgtcaaaattcttaatacattggttttatttgcttggaaaagtttcggtgataattgctgaaggaccaggctattttatagaaaagttctttttctcttgaggctattggatgtgaataatcctgaagtcttcttctgtagcaagtcattcaagaaatggattgacctttaaaagaaatttcacagtaattttcctctggcttatttttggcaatcaaaataaatagaatcacagactggggactgggcatggtggctaacacctgtaatcctagcgctttggcaagccagggcaggaggatcactggaggccaagaatttgagaccaacctgggcaacaaagcaagaccctatttctacaaaaaaaaaaaaaaaaaaaaaagagtcagacatgatggctcatgtctgaagtcctagctactcgggaggctgaggcaggagtactgcttgagcctagcagttcaaggctgcattgagccatgattacaccactgcactccagactggttgatagagcaagaccttgtctcaagcaaacaaacaaacaaaaaaaacaaaaacaaacaaaaaaaactaaagactagagggatgttgattcctctttgaaatcttaggtttatgcttagatgagacactgcagtagcctgaagcttcatattagtctattggcatgtgctttgacaaaaagcaaacaaaacatgtaggtaacaaagatgaaagataaaatagaccaacatcaagaaaaatggcattctgagttttgatctcagagaactagtcccctctctatgttccaggaatgacagaaaatgacatatttcaaatacaagttaattcttttcttttagctaaattgttcacgattgaatggtgcttttatacgtcaagaaaatgatcccttctcttcctgatcttctattaaaaacaatgagacaattaatttttcctactgatgaatctgataatatgcactgttaaatgtgtggaacgcaaatttagagtttcttatacagatcagatactcagagggagtataattcaccaaggattcccctttggaaaatgatgtttaaaagctcagagagcactaattagattaagtacgatgatcatgagagaaatgttagattagaaccaaaaagtttttgaaagggtagagcaattcggaggagctaagagaagattaatgcataagaattgagtgactgtgctaatgacaaaaagaacctaaagggacacatttcaaatcagtcaatggtaaatggtggagaggtgtgagaggaaaaggggtcagggcccctttgacaaatattctcttaggtattttctcttaatagagggtccttgtggaggaagagtgatctaaaagtttgcatgggtaaaggaatacctgttgaattcagtaagaccttaaatgcccaggggaactctctggccttggcttagtaagcaatagaagtcactgaaggtcttgaggaaaaaggagggagaagaacgccgtaggttagagaagcaaatctggaagtatagtgtagactgtgggagaagagttcacgctggcgattagaggcatgtgtgagtttcgattgaatgtgtgggcagggcttacagatatgagatgactctgagatattctttttttttcttttttttttttgagacggagtctcactgtgtcgtccaggctggaatgtagtggcgtgatcttggctcactgcaagctctgcctcccaggttcacgccattctcctgcctc[133 bp omitted]aggcctcccaaagtgctgggattacaggcttgagccaccgtgcctagccaactctgagatattctaaaggagtggggggcttacagagaggaatcatggacaggctagatggtatctttgaagttatctgatccaatatactacccaatacgatatgtctacatttaacagtccatagcttacattagagttcactctgtgttggtcattctatggattttgactaatgtcatacatccaccattacagtatcacatagatatcaatttctttttcagagacagtgtagactaatgctgtatcaatgaaggaattttctttgactaccagatatctgtttctgtaatgttatcagtggattcccactgttctgccagaagttttgaatgttcttcctgctttgcaggcagtttctccctaaagaactactgaatattatgtcatactcccaacagggtaatatatgtgatgtgcactgtaaaactttccaaaagttattaaaatactgagttccaaatgcacctggccccaaaggttgtggatttggagttgtggatctatactccctagtatccccagcaggatctgggagaggacctcagaatcaaacaacttcatatttctgcagtgaaagaatctctgcacataaatactcacactaagtgggataaagagagataaatatctctacaccactttcagtcaagttttgttgtgaaagggaaaacttattttcttaaaaaaaaaagattttgtcttttcaaagcattttggatttcagaattgtagataagggatggtggacctagacaacacatgacaaagtgatataaatgccactgtaaaaaagactatggcactccagcctgggcaacagagtgggaccctgtctcaaaaaaaaaacaaaaaaaaaaacaaaaacggccgggctcagtggctcacgccagtaatcccaacactttgggaggccaaggcaggcggatcacatgaggtcaggagaccagcctgaccaacatgatggaaccccatctctactaaaaatacaaaaatcagcttggtgtggtggtgtgcgcctgtaatcccagctactcaggaggctgaggcaggagaatcacttgaacctgggaggcggaggttgcagtgagctgaaattgcaccactacactccagcctgggtgacagagtgaaactccatctcagaaaaaaaaaaaaaagaaaagaaaaaaaataaaaggctatgggcccatagagaggcaattggttcgtatctttaccccttagctaagctgattttagataggtcaagaggaagtgataagggaatggagccagtggcatggactatttgtatgagaaatttatggtggggcgcggtggctcactcctgtaatcccaggactttgggaggccgaggtgggcggatcacctgaggtcaggagttcaagaccagcctgaccaacatggagaaaccccgtctctactaaaaatacaaaattagctgggtgtggtggcacatgcctgtaatcccagctactcgggaggctgaggcaggagaatcgcttgaacccaggaggcagagatttcagtgagcagagatcgtaccattgcactccagcctgggcaacaagagtgaaactcagtctaaaaaaataaaagaaaataaacgtattaaaatgtttcaattgctatgtttttgttaaaagcaccaggaattccaactcaaagaagctaaaacattaaatgtgtcagctaatgtatctggaaggatcagagagaagactagcataaggcaaggcttgatctggaagctcagtgatactatcaagagctcagatccttttggcctctcagctctgccctgtaacttatacttttaggtgtacatgagcagggaaaacaaaactgaagaccgtagcttaggccatatgccccatccatccctggaggtaacaagaggaaagtcaccttccttgggactgtatagatgcccaaacagaaatctgagggtattgagaagggggaagagggattggctggtgcagagggaagcatttgacaaagacaaggggagaagccattgaaaggaggtaagcttttaatgtttgttttagatagagagtatatgtgtgtgtttgagggcagaaaagtggggatggggtgagttgaagtctagaactcattagagacgtcctggaggaggaggggaagagaaaggatttagacagagagagacagtgggtgtgtggcttggtaactagattgtggcaactggctctggtatcctgaacttgaactgcctgatagatgaacgggcacacctggttactcaaggcagtgtctcttggggattgctgtggttacagagcagttttttctgtgaggtcaagccacagctatagcctcaagctacttgagagctaaacctatctgtttaattattgctaaaaggattttattgttcactatgcacaggcatataaaaatgcactttgaggttataagattgggtccctgaactgacccttttttggtttcaagcagcaaccattacagaattttaaccagataaactgttagtaaaacatatccacagtgattgccacttctctgctatctttatatgaagatagcattttttagaagaaaaactctttattgagtatgatataaaatgcaaacaactaaacatcataagatgacaatttgatgaattttcaccaactgaaaacaacgagctaattagcatccacgttgaaaaccagcacatcgctgccactccagtagctttcttctacatgttattctgaccatgtttatgcttaatccagtttagggataaggctaccaaaagcatgtagtctgcctttgaaataatatcatggcaattttagagtcaactgttaacttggttatgtcagtatttcactgctggaagactgatttcagaaatactttgctcccaaaaaacacatctttaagcaaaaatctgaattgcccataacaataattttctccttttggtacatcagcagaatctgtcaaatggaagggtgaattgatgagatgtagaggatatggatctttattaagcagcaatgagtgagcaaagaagcaaaatattaaatagcaaaaaacaacaaacaaacaaaacaaaaaaagaagtggagactgtaccttactatttaattcaggatactaaatacatactttgcaagtgatggttatttgctaatagctttttaaggtgttttactttgtaaagattattatagaagaaactgttcttcttac[134 bp omitted]acctctgcctcctgggctcaagcaattcccctgcctcagcctcccgagtagctgggactacaggcatgtgccaccatgcccggctaatttattgtatttttagtagagacggggtctca[147 bp omitted]tattctaacttgtttctgttttattagaatatcagtgcagatctgacatctatcaatctacataaatatatatatataattcaatccaataaacatatgtatatttatgtaaatggatcttgagatgggagtagggcatgtgaatttggaaatagtgttttaaaacatcagtgggtagctattttatagttacttgttttatagtttttatagttacttgtttttctgaggtaggatagaagaagcagttgaggactggaataggaaggaaaaggctggggagggaaagttgtagaaaaaagataggaagctgagaggtcatgggagctgcttttgctgaagttgttcatcaaaccaggggccagatggccaggctgaggtggaggggaccctcctccaatatccctgactcccttgcctgtgcttggcctctgctgggactgagaactgggagagtggctgccattggcttgcctgctcccaggcgattcaacactttcctgttccctttcctccaaccatacattggctcccgggaccaggccgtgtgtttatgtgtgtgttcattcagtcataactgcacaccatcgattcagatcacacatatttatcagaagtgtagccaactttgacgtttgtttggttgaatatcaccagtagccaaaaaagtctggtgaatgtcaactttaaaaaaaattgtggtaagagcatttaacatgaaatctgccctcttaaattattttttctttatttttgagacagagtctcactctgtaacccaggctggagtgcagtggcacaatctcagctcactgcaatctctgcctcccaggttcaagcgattctcatgtctcagcctcccgagtagctgggattacaggtgtgcgccaccatgcccagctaattttttttaattttgtttttatttttagtagagacagagtttcaccatgttggtcaggctggtctggaactcctgacctcaaatgatctgcccaccttggcctcccaaagtgctaggattacagatgtgagccaccacgctcaacctgccctcttaaatttttaagcataaaatacagtattgttaaccttaggcatggtgttgtgtagcagatctctagaacttactcattttgtgtaactaaatctttatatccattgaacagcaactccccattgccccttccctttagcccttggcagccactgttctactctctgcttctatgtgtttgactaatttgattctacgtagaagtgagatcatgtagtatttgtccttctgagactggcttctttcgcttaggataatgtcctccaggtttatccatgttgttacctatgactggattttcttctttaaggctgaataatattccattttatgtagttaccacatttttctttgtccattcattcaccaatggacatttaggttgtttccactttcttgttattatcagtaatgctgtggtgagcactggagtacaattatctctttgagatcttgatttcagttcttttgggtaaatacccagaactgggattgctagatcatgtaatagttctctttttaattttttgagaaagcttcatattgttttccatagtggctacccatttgtgaatgtcaacttttaagtaactctctgattgtgatttgattgttgtgggtacaatttatacttcccaagaaacacctatgccagcagaaatacctgtgccatcctaagcttttaacttttgataagaaacgattgaatcgtatataacagagaaacttgaatattgagacgatcttgctctttggttttcaaaaaattgtgtttttctatcaaagatggtttaaatatagcattttccccttccaaatgtggtttattctcaacactttagatttattactttttgccttcatttaaatttccattcgggttaattgaaatgtaacagatggtccttgacactttgacactctctgtcaaaacgcattagtggaaatgcagcatttcaaggggaagtttgtacccacaggaaaggtgggattatacctacagtctatgaaatagaaagacagtcatttgaaagttcagaatggtaagttatctgccatgcccaggtcaagagaagttacaaatgtgcttctgttagtggaaaactatgagagtgaatggtgattggaggccaagtaaattatagagggaggagttaaggctgcaggctggagaagctagaggagaccagtggcaagagaggaccagggcagattttagatgtgaggacactggtggtgggcctggaaggcttggagagtgaaaagtgaaggaagaggaggcaggcaggaggaaattcaagtgaaataagatgagaagtggctcttgcaatatgagagaggatctaatgatactgttgtatgcagggatggaaggaaagtgaggccaagggcagcagggtcaatagaaaagggagaaaaaaaaacagtgaaattagtttcctgtaaccccaccagtgtcctacctgtctgtagagtactggccatcaaatagctcccatggaaagctagcatgtctcgaaaggtaattggatacagagcatcatctgtcagtgtactgaccctcgggaaaagcaagagcttggtttcctgacttgtgaataaacatttactctcctaagaaaaattaaggaattctgtctcatccacttaagtctaagtcaaagaaccgaagggatgaccctgcatcaaaccaaagtgagtccacttgtttgatcagcttaaagggatattttcatttgtcaagtgttccagaaatagtacataagatattgatattgtgtatttttgctatcaactggtaataattataaacatgccttgtgcagatttcttcttcatcaatttatccaaatataagggtcttggccaaagatttaaaatatcccaggtgtaacatccctaatgttatcttcctgaaagaatgaagtaggttcggatggagaagaaatacctcagtttaagaaatgaaaagcatctgctaataatgaaagaaaattgtacttattcttctgggacttcacaatgttccttctcctacccaggcacgtcctgagcacagagtgctaagtagagtattgccctcgggaggttcacaatcagcctggtgaaagatggcttgtgttgacagacaagccaccttcatctggaacttgtaaatttgagctggggacacatttgtcacatagcaaccttgaagtaaacagggtgattcctcccccagaaataggattttcgtttgctgagggggttggattagattatcttcctgccctggtacagctctagtcctctgtggcccattcgtctaccttttaaaaatgcctgtggcaagggattctcaaatcattttggtggaggtatagactgaggcaacatcattaagagggcaacttgggaatatctatcaacactcaaaatgcacaaatcatttgggcaagagttctacttgtagaaatttagcttgtacacttagttgcataggtgtaccaatatataaacacaagatttattgtagcaatggttgcaataagagaaaaaaaagtgaaaaaatcctgtatactcatcaatgggagacggatttaaaacattatgtatacccatgcaatgagctaataatcaatatttaaaagtttgagatagagctatatatgttcatccatatgtgttcttatccccatgagggcctatattttttatcttttattcccctctgcatttaaaacagtatctagcacatgtaggtgaagtacctagcacatttaagtgaagaaaggaataatgaattagttttaaaaatgagtttaaagatgtctactataaatgcccaaaaggtactgtgtatttcctaaggcatttcgtaagtggatcttggtctttcccagttgtgatagcagggggtatgagtattttacacagctctgccttgggagagtagatgattttggttagtagtgagaaggcttaatccaaaatcttgataacattctctagggctgtacaggtggagatggggaaagagacactaaatagccatctgcaaataccagtcactgttcagagcatttcacgaatgatgctcatggttgcaggacgctttgactgtgcttgaaaagggaatatgagacaaattgccagctatcccatttgaaaacattttggttgatttcttgttagttttaacacaaactctttagctcagcaaagttcactccttaaatgagatgaaatgtttccaaagcatatatttgcaatgaacatgatggatttacacttcttcatgtcagggagtgaaaagatataaacttagtgaaaagagggtaatgcttaaaatgtccttttccttaataaataatgtaagagatttaaaattcctaaaattaccctaattgttatctgtgtgtccattaattggaaaccccaatttcattcccctttgctgttttatttctttgccctcatggttatttttattttttattctgtacatttaaataaagcaccggcggggggatatactcttacaggattttgaaattttatagcctcacacttccaagttctttatagaagaaattataaagcctaataaatataactacacctgtcggttaaagatacacattacggaaaataaaaccgctgctcattttcctgtgcatgtttgtgagagcatttaaggatttgtttgaaaagaactgctgaaaatatggaaacttgacatcgtcacgaaacttgctgagacgctgggtgctgatttacaagaacacgccctcagcaccctcgttgcggtagataagccaactcttggcagactgttgtagccacagaaactcatctgactctgctacagtctgacgtagaaacttagaagagtatgtagctgctgattgacagctataggtctgtagggaccgtagtcttggtactctccagccttcttatttggggggaacagcactggaggagattagccacattagctagaacctgcttccatctttatgccctcataatagactaaaggaagaatatgaagaaatgtattggaaatttggactttctcatataaatggagccaaagccttatttgtcaattattctatggaaacaattgtttttttctacccctcaacacctccacccctactttttaagactttttttttttttttgagacagagtcgctctgttgcccaggctggagggcaatggcacaacctcggctcactgcaacctccgcctcccggtttaagcatttctcttgcctcagcctcccacgtagctgggattacaggcatctgccaccatgcctgactaatttttgtatttttcagtagagaaggtgtttcaccatgttggccaggctggtctcaaactcctgacctcaagtgatccacccgcctcagcctcccaaagtgctggaattataggcatgagcgcctggctcaagactttcaaatctaacacattttattttttaatagaatgtattctttaaaagttttagattgtaagaaaaacagaagatagtacagagaattcccatataccctgcatctagtttatctctatcacccaggctggagttgagtggcacggtcacagctcactacagcctcaactcctgggctcaagcaatcctcccgcctcaggctgctgaggaccacaggtgcacaccaccatgccttgtattgtttgtagaaacggggttttgccatgttgtacaggctggtctcgacctcctgagctcaagggatctgcctgtctcagcctcccaaactgctgagattacaggtgtgagccaccacaccaaagagctgggattacaggcgtgagccactgtgcctggctagtttcccttattgttaacatcttatatgagaatcattcatttgttgcaatgcctaaaccaatattgatacattattattaactgaagttcctagtttattcttatttccttcgtttttacctgatactcattttctcttctaggatctcatgagaaggccacattagacttagttgtcatctttccttaggcatctcctggccttggcagtttcttagactttccttgcttttgacaaccttgacagttttgaggagtactgcgatggtatttgacaggatgcttctctattctctgatgtttttctcaggtcccatgttttggggcttggggacaaagatcacagaggtaaagtgccattttcatccacatgatttgtgactgttaatgttacctttgatcacctggctgaggtaggtgccaagttttccactctaaagttgcttcttttccaccttttccatactgtactcttcagaaggaagtcactatgggcagcccacactctttgtcaggagttatgctccccctccttgagggcagaatacctacataaattctttgcaattctcctgcatagggaattgcctcttctccgccatttattaatttattcagtcatgtatttatatcagtatagattcatgagtatttattttatacttttggttataatccaatgcttttttttttttttttttgctcatattgttgcatatttagccactggaggctcttttttttcttattttttttgagatggaatctggctctgtcgcccaggctggagtgcagtggtgcaatctcagttcactacaaactctgcctcctgggttcaagccattccccagccttgcctcccgagtagctgggattacaggtgcccgccaccatacccagctaatttttgtatttttagtagacatgggcttcaccatgttggccaggctggtcttgaacgcctgacctcaggtgatccacctgccttggactcccagagtgctgggattacaggcatgagccaccgtgcccagcctagaggctctttcatttagctcctgtgctcctttgacatatccccattattgtgtgtgtaggttctttgtttattcatttgtttgagtactttcttactttctggcactacgagatgctccaagctcatcttgtatatttcccttcccagtcattaattcagctgtttctccaaggaaacattatccctttattggataatggctttagaaggcaatacctgggctctacgcatgctcattgctactggagtatcatttcttttaggccttttcagctgacagagcaaagaaataaaagtgtgcatacaaacctatgtgtatacacatgtctgtacataacaatctctatattaagctcaacatgagttcatagtgatgaactttataatccattaccacatggaccattctagcctcctcccctcgcttatctgtaaacttccacttcaagggtgagaaacctggctccatagttggccttccacttacttagttgttcaaatcccaatatacatgcatagcagtatcagaattattaccctggacctccctgggaaacaatcgagtagagtacagtgctcatatgcagttcctttttcttttaggtttacagatgccatttatgtccagagctactgaggtcagcaccttttctccccatctccttcagtaagattgtttcataaatttgtcatatagttacattctcttatcatagtctgcattccttactgggatcccttgacctcctaaatcattcttaaagtctgcatatattaaggttcattctttgtgctataagttctgtgggttgtgacaaatacataatttcatttatttaccattacagtatcagacaaacagtttcactggtctgaaaatcccctcattcacctatacattctactccttcttcctgagcctctggcagccactgatttttttaatctttctatacttttggctcttatagaatgtcatataattcaaattatatggtatgtatcctttttagactggtttctttcgcttgcaatatgcatttaatgttcctccatgctttttccatgacacaatagctcatttatttttatcactcaataatgctccattgtatgcatgtaccacactttgtttatccatttaattactaagggatatcttgaccgctttcagtttttagtgatttcctaaagctgttatcaacattcacgtgcaggtttttgtgtggacataagttttcaaatcgattggattggtcaattcttttatgacgtgaaactcaaagggaaaagtggatctttttcatctaaacctggtaggagaggataaatcactttccagtggtttgtgattcctttataattatataaaactaattcttttcatttctatccaacttatttatttatttatttatttattttgagatggaatcttgcgctgtcgccaggctggagtgcagtggtgcgatctcggctcactgcaacctccacctcccgggttcaagccattctcctgcctcagcctcccgagtagctgggactacaggcgccaccaccatgcccggctaattttgtgtatctttagtagagacggggtttcactgtgttagccaggatggccaccatctcctgaccttgtgatccacccgcctcagcctcccaaagtgctgggatcacagacatgagccacggtgcccggcctctattcagcttcttaaaattatcatgttatcaacatttatcctcttcttctgccactaccacccttagttttaactataagcagctgtactaagacattcagcacctgtttaggaactaagaagttttccgtaatatctatttgagcatgagtaccctgagcatgattgacataatgatgtacaaagtgggccttttctagctactcactgagcaaaacctgctgtcgcaagaagcatcaatggggaattctccagcggaattgcaatgaactattctggattcccagtttaagggacggaggtcggagttctgctaacattccaagctcgactttgtcagtgttctctctagttctcttcttgctagtcccttagatagtgctttcatcatgccgacactcagggctctctctgatagtaggctcccattgtcactggggagcgagagttgaaattcttcacattagttgaattatgctatttgctgaatgctgtgtactggagaagggagatctagggccatcaggttcatctagagaatttttctttgcccaaaggcaggagccaaatgtaacaagatgctaagaattcaagaagaagaatcatcatataagatgaggggctgggtgcagtgactcacccctgtaattgcagcactctgagaggccgaggcaggagaattgcttgaacccagaagtttgggttcaagcttgagcaacgtggtgaaactctgtctctatgaaaaatacaaaaaaattagccaggtgtggtggcacgcacctgtgatcccagctacttgggaggctgaggcgagaggatcgcttgagcccaggaggttgaggctgcagtgagctgtggttgcaccactgcactccagcctgggtgacagagtgagaccctgtctcaaacaaaaacaacaaaagaatccaaaaccaggcacttccaaaccagggagcataggttgttttacaaactcactgcccttttcttttccaatatccctactatttgttttgctggtggttatggtgatgggaaaggatgtaattgagaatggaacatgaaataagaacttggtcataacctgtataaaactgtgtcaaagtttactccttaaatgtgtacttgaaacacccatttcttgtttccagggtgccaacagatgtcgttttgtaagaaaagctccccaaaattctgtgcatcggactcatttatgcaatctctgcctacattgggaccccactgaagccacgacccctaaggcagggctggactgccttgcaggtctatgaagttctccattccaaatctctctcaattgtgatttgcattctacatttataggcagataattagctacattgcaatgtctaatatctttcatatatatatatatttttgtttttttgttttttttgaaatggagtctcactctattttccaggctggagtgcagtggcaggatctaggctcactgcaagctccgcctcccgggttcacaccattctcctgcctcagcctcccgagtagctgggactgcaggtgcccgccaccacgctcggctaatttttgtatttttagtagaggcggggtt[133 bp omitted]gccccttcggaggcttatgtcctgaggtacatgtttggcaaatatcaacattctataggaaatttcaactggacctatttacagattaaataagacattaacctaaaaacagaatcaccaattgacatttatttatttatttatttattgagatggagtttcgctcttgctgccccaggctggagtgcagtggcacaatctcagctcactgcaacgtccacctcccaagttcaagcgattctcctgcctcagcctcccaagtagctgggattacaggtgcctgccaccacgcccggctaatttttgtattttcagtagagatggggttttgccatgttggccaggctggcctcgaatgcctgacctcaggtgatccacctgccttggcctcccaaagtgctgagattacaggcgtgagccaccgtgcccagcccaccaattgacttttgaaataagtgttggtattatgaactattcatacatgccaaagaacatatatagaatatatgtgttgtttaaatcataataacataaacacgtggtatcctccagctagtttaagaaacacccagcaaaggtatttgccctcaaagagtcctgtgtgccccttcctgctatcctttccaagtttttctccccttacagctgaggtctttcagaatgtagaaggacctcatacgcttcacactgggacctacagaggctacccaactctccaaggtgacccagagacatagaatggtacctgtttctactaattcctgctccagtgagtttttcactacatcaaatttttgacatttattttgaacaaggaatatttttcaagtcaaaataggtacctaatgggctgggtgcagtggctcacgcctgtaatcccgcactttgggaggctgaggtgagcagctcacctgaggtcaggggtttgagaccagcctggccaacatggtaaaaccttgtctctagttaaaaatacaaaaattggccgggagtggtggtgggcacctgtaatcccagctacccaggagggtgaggcaggagaattgcttgaacctgggagatggaggttacagtgagctgagatcgtaacactgcactccagcctgggtgacagagtgagactctgtctcaaaacaaataaaaataaaaagtagctaatgattattatctataaacatcctctattcgttttcagctcatataaatgtttcttttttctagatcctcaaaggagcaaaggctcaagatttctatctcatcacataaagaaaaaaatgagggaatggaagggatttataaataccagagactataactctgtgactataaaacagtgacaaattctgacaaagtgctacttagaatcctctacgatcgggtggtactcagaggtccatgggccagcagcatcagcaccagctgggagtttattagaaatgcagaattttgggccatgccacaggctactaaatcaaaatctgcatttaacaagatccccaggtgattcatatcacaatatagcatgcttcctagtccgatgtccaagattcatagttaaattttcacttaattcacatttaaggcagagaaaattatttttaaaactctgggaatttctcataagaaaataagaatagtgttttctagaatggttttatctcctaacatattgtttcttatgtacgcactattaatgcatccttttaagtgagtaatcagttgtggtatctttatcacttagacatttgatgctgtcctaaggtaaataccagtgtgggaaaaaaaaaccacagtcttatctcttacttctgctggtctagaggtgggatcagtagcatgcatgtgaagtttcagattgcgctaaatgaactcatgtcaacttctttcagcatcattgttagtgacagttttgaggacatggtgataaaataaggaaatctattgagtcagcagtgcaaagtgaaatgcagaaagtgcaacagaaagtgtgaatccggaaagttaattcctgtgtacgtgtgttttgattgccattcatatgtcaaaccctgaactataagtcctgagttacatgaataataacctctcagcaaattgactagaagtaacaattgaaatatatttcaatatattttaaacgcatgttgaacaagaagccctggaagaggaagatcaaaactactttgtttactctgcctcttccagggcttctcaactttgatactattgacaagttgtaggaggtggacctgtgcgttgtaggatgttagtagcatccctggcctttcctctcagtggcacccccttcccctgagatgtgacaatcaaacatatctacagacattgcagaatgtcccctggaggggcaggggggtggaattgcccccaagttgagaatttctgccctaggcagtgcctatcatggcccctgcctcccatcctggcaatacagtcactcttcctggtgacccaacagcagaaccaatgtcattgtcctcctttccagagctctgtgctccaaaggtggggtgtgctcctacccatgtcacttcaccctcatcatgcttatcatccacctttcttaatcataaccttcatcattatgtgaaactggggacaaatgatctctttcaaatgactggcatatagagttgatcctcatcctttgaggatttcatatttgtgaattcatctagttgccagaatttattcataacctccaaatcaatacttgcacacttctgtgatcatctgaggacatgtgcaagatggagaagaatttgagtgaacaaacctgcatgttctcagcttaggtcaaacaaggtggcatttggccttcttgttttggctctcatggtataaacacgtgtcctttttgtggtctatttagtactactttttttttttttttttgcatttttgtgcattttgttggtgacttacaaatggctcccaagtgtagtgctgaagctctgcccagtgtccctaagtgcaagaaggctgtgatgtgtcttgtggaggaaatacatatgttagacaagctacattcaggcatgggttacagtgctattggccacgagttcaatgttaataaataaacaatatataactgtctttaaataatcaggtgtctttaaatagaaacacacatgaaacaaagttatgtattggtcaggtgatgaaaatgtgaccagaggctcacaggaaccgaaccctgtatttcccctaggagcaatggctctgtattcactaattcagcatccacagtaattttatagaactactgcaaataatgataattgactgtattcatgtgggaaagcccacttgaaggatatataaaaagctggtaacaccagtgactccaaaaaacagaattaggtggctgagggacggggtgggaggggactctttactataattccttttttgttttgggctacacaagtgtagccatcaaaaaattaaacttaaaaaacaaatgcaaataataaaatgaaaaaaaaacaatttaatcatgtttgtctttaatctcaggaaaacaaagtaacgcctatcaaaaatccaatgtatcaaatgacacccaaatgccctccctggtcttctagaccttccacaagctgttctcatgctctgtctgctcagctctgcttctcaccacccgcttcatgagtgtatctggttatccctctggattaccccttgccctgcaaagtactcagtaactcagttactttggtgttgattacttcacatgtctcaacagaaacacctttcttctctctacctagcaacattctgctttttcttcaaaatctttaaatattttcctgaccatcccactctaagggacctttctcttcggcttgctggaactcattagagtttgttataacttaccattgtagccaactgactttgttggttgtgtttaagttttgagtctccctaaattcattacaagttattgaggatgggattggtgtccttcttggaactccttcagagccttgcatgtaatagaaactcaataatgttgattaattatcctttatcattccataccacagtttttttttggagatggagtctcactctgttgcccaggctggagtgcagtggcacaatctcagctcactgcaatctccgcctcctgggttcaagcgattctcctgcctcagcctcctgagtagctgggactaccggtgcccaccaccacacctggctaatttttgtatttttagtagagacagggtttccccatattggccaggctggtctcgaactcctgaccttgtgatctgcccgctttggcctcccaaagtgctgggattacatgtatgagcccatcatgcccagcctgcagcctgtctttctaagtgtattcctgtccagttaggtaaaagtgaagctgcctaggtaattaagttttaagagtagtatgaagatgttggttggagacctgaaaaagacatgcaattgctcttcaaaatgagcgaaagtagaattgtgccatttgtgaggaggcgatccagaaaccagatttttatctcaaacgagtcacaaaatgggaagggatccaagtgtcgatttgttgaattcctgctgggctacacactgtctgtagcacctagtatacctcattttatttacatgagcctatcaggtagctttaatgaattccattttataggtgaacaaatggaagtttagtcactagcatatgtgttatgcagctggtaattgcagaatcgggataagaggccaggtctaaaggcctatcatgttgggttgtccccaaacagaacacataataaacattttgaacaaatataagttatttgctgtaaattcacaggattacacctctgggtaaaatacagggcaagaatgttttgagatggccccagccaagcattgtacatctatgatatgctgcaagggaggaggaaacagaacgaagaactttgccctccttcaaggcaactagtatcagctagtgatagttctcagtcctagctgaacattggttccacctggggagcttaaaaaactatggaaggctttggaaggctgaggcagggggattaccggaggtcaggagttcgagaccagcctggccacatggtgaaatcctgtctctactaaaaatacaaaattagccgggcatggtggtggatgcctataatcctagctacttgggaggctgaggcaggagaatcacttggatccgggaggcagaggttgcagtgagccgagattgtgctattgcactccagcctgggtgacagagtgagactccatctcaaaaacaaacaaacaaacaaacaaactatggacgggaagggcattggacataattagttttgggtgggactcaggtaccagtaccattataaagctttccaggtgattctaatgtgcaaccagggttgagaaccactgagctaaaaccacagagaggtacacggatcaagtggtttctttagttcagtggtttttaagtctggttcttggaccaccagcattagtatcacttgggaacataatagaaatgaaaactcatgcacttcacccaagactcactgaatcagaaaccctgaaggtggggcccagaaactctatcttaaactctctggatgattttgttgtacagtaaggtttgagaaccactgctctcagaacaggcaattcattgaaaaggaaaaacaaatagccaataaacatatgcaaagatgttcaaccactt[133 bp omitted]gaaaccccatctctactaaaaatacaaaaaattagccaggcatggtggcgggctcctgtagtctcagctacttgggaggctgaggcaggagaatggtttgaacctgggaggcagagcttgcagtgagctgagatagcaccactgcactccagcctgggcaacagagggagactccatctcaaaaaaaaaaaaaaaaaaaaaattagccaggcatggtggtgcatgcctgtaatcccagctactcaggaggctgaggcaggagaatcgcttgaacctgggaggtggaggttgcagtgagctgaggtcttgccactgtactccatcttaggcgacagagtgagactctgtctcaaaaaaaaaaaaaagtaacaatgagatacactttttaatctttcagactggcaaaacttgaaatgatcgataatatccagtgtgacagtaggagacaggaaaacattttatatacgactagtggaggggtaaaccaccaccactataacaaccttagagagaatttgtcagttgaattacagattacacatatgtatatcccaggaccaggcaattccctccttggcctccctgctaaagaaacacttataccacccataatcccaagactttgggagattgaggcgggcagatcacttgaggtcaggagttccagatcagcctggccaacatggtgaaaccctgtctctaccaaaaaatacagaaattagccaagtgtggtggcacgcacctatagtcccagctacttgggatgctgaagtgggagaattgcttgaactcggcaggcagtggttgcagtgagccgagattgtgccattgcactccaacctagaccacagagtaagatgctatctcaaaaacaacagcaaaacaaacaaaaaccacatgcacgcacacacttgtactagtgcataaaatgatgaataaaagatattcatatgcatcatgctgtttttgcagtgggaaacagcccaagtgtccatcactagaggaatgcctgagtatactgaggccagccttactatagagtccaagcagcaagtgacaaggatgaggtggctctacatgtgcacgtgtagaactgcccccaagaccttgtgaaatgcaaaggcaagttgcacacacatggatcaaatacaatttatggtctacgtgaaatgtggtgggggaaacatccggaatggaggtgtggacaaagagacttcagccttatctataattttaaaatttctgctaagattattatccaagaattttttgagcaataaaaaataattttggggtgtgaaaaaaatttctgtggaaataatatactagattgatgatatattatggtatacttaataatttttggtcatgaagctctgagaatctgacaaaagtttcccctcccccacaaaggcacaatatgtttgttcaatttgaaggaatttctagataacctgaagcccattcatagaccccttagggcttcctgaccccaggttgagagcttctgggctgctcagccttcaagggttctaagtggttttactcttctgtcctgggctccatgaccccttctttgtcgtatgtgtctcagaggagtcataacatctgacagctatttttatgagcatcagcagctcttctcctgcagattaaatttcaccagaaggtagattttcgctgacatcttaatacttggaaaggagcagatgatccttgaggagtgagtgaatatagcatatggtttgctgagctgcaaacagaagctgatctatgtcaaggaagcttcaagtgttacacatgtgctcttaggcatcatcaggttctgtttttaagttctgcagtgtcattctccccatgcacacagacccttttcagtgttttccacttggcttatatattaaaagaagaagaaaatagcaagaaaagattatctttccactgttagatttttaatcgatattctgttattccaaaatggtggcagaacaaaggtttttatttgccttattttcgtctactttaaactgtcttaaatggcaaagccagttctcataaaagtgaaactccttggtaatctactttttattaagtcccagagctgccaatagatttatggttcttaggtagtaagtctgattaaatgtgatgtgcctgccatttccatggatgccttgcacacactgtcgacctcatctctctgtgcccacccaggacctcattgctgctcaccctgtagcaggtttgagagagctctggacaagttgactacaggtggatttatttctcctttctctagcctcccatggatgcacttacattctaagtaggaaaagacaggtctaaatattatatgttatctgagaaatttggatggtcattcctttaaaaaaaaacaccatggattttattcagtagggatgcaactggatattcttgagtcttttcccatctggaataataatttctgcagctggcattgaagcctgccccttcatgagctggtccaacctctctttacaggttcatctctcattgctttctcccataaactattgctcccagccacactggcatcctttcccttatgaaaatccctttcttcttctgagtctttactcatgctctgctaacttgccctcatatggcccctaccagttcatttattttattcgctatcatccagatccaaatctagatttttcagaaatttctgacatttctgaaaaatctagattttcattcgcaagtcaaccccatcaacagtgctgagtctcctttgcatgtttgcaaaaccttgtctgttgtgctcataaggtacttctctatgaaaggtggtattgtacctgccctcagtatatgtatgttgagcacttactatattccaggcattcttctggttccggtgatatgaacaagttttgttctcatggagcttgtcttcaaatatgtgaggcaggtcaaataagtactgtacacaaattcaatgattccaaagagtgaagaaaatgaagcaagatgatgtgataaagcgactaaggaggagagaggctgctcagtgaagatctcttgagaagaacacatttgacttgaaatgtgtatgatagaaggtgtcagtcatgcaaaaatgaggggaaagagccttccaggtagaaggaacagcaagtgcagaggccctggggtaggaaggagcttggcatgtgggtgatcataggtttcctagatggcaaaggatttttttaaaagatgtctgtatttctcttacatcatctagcacataataaagcaatcagctgcaagactcttagctccataaggatagctttcatgcctgtcttccttccatgacccagcccagtaatagcacttataggcactcaaattgatgaatgtgtggatggattttcactgagtaactgaatgccttatctctgatccgacagcagttttgcagcagaaccagaatggacaaaataactccatcatctcctacatgctagtctgtgctgagccagcttctctcaaatatctgtctccaaggtttggtgtcaccattcattgaatgaagtaagaacagggcacttcccttccggaggaacgttgtacagttaagtgcaatcgcatataggaaatggttggaacttttggaagcagctcagtaatttcagacaattcctacagcatggctcagcaggcaggaagccagaagtcattgtatattaaactttacccatgcaacagtgggaatgcagtgtgaccagtccctgtcctcgccactgtgggatttccaaggctggcacctcttttaagcttttggaatgtagataaagcattccatcatgttagcgggccctcttttacctctcctgctgccgagtttattgttgtactaattccagggctcccatctggctcttctcttgcattctcccatggagaagcctgtgttaaactcattcaaagtaatccctactggcatggtgtttttagcgtatggaagagactgtccattcatagaagcaataatgtggtaagatcacttttcaagagtatcagttttaataaagaatagaatcaaaaggtttcttaaagtcatgaacctccacaaaacatccccacctcctcaaaacaaaaaagagagttgaaacttcatgcctactttggttttcagtggcaacgaaagaagcttaaaactactgtaggccgagcatggtggctcacgcctgcaatcccagtactttggaaggccaaggcaggttgatcacctgaggtcaggagtttgaggccagcttggccaacatggcaaaatcccatctctactaaaaattcaaaaattagctgggcgtagtgacaggtgcctgtaatcccagctgctcaggaggatgaggcaggagaatcgcttgaactcaagaggcggaggttgcagtgagccaagatcctgccattgcactccagcctgggcaacaagagcaaaactccatctcaaaacaaaaaacaaaaaaaactacttttttttttgaaatgtttacatttttgaaatgtttaatttcttctttcagtgttatggcagtggattagaatatggaattattaaagagtaaagattgggaccgccgtgttcaaatagagaaactgaggccaatatggaaaaagcactgcgatgctctccttccaatgaaaccaagacaaaccagttcaccctacgaagaggccaaatttttcctaaacagcaaaaagtagatgctttgcaagtgatagttcctaaaaaggatcctcattctcagcactctgctgctgttagcactgctgatggcagtccagagctgaatacatgtgcagagaacttccatttgttaacaaccagtcagggaacttcagagctaagttttatttttgcccaacagcatttattaacacaaccctgttgtttttaccagttgaatttaagtgtcaggtccatccatgacctggtggtggccagagtttcatattgtgtgtacaataatatgtagctgatgaaggtgggaagaagagttgggatgaaatggtagggtccacaccttctggcttatcccgttaccacctcacaattactatctgagtgggcaatgcttcagatagagtttgagcttagacagacatgttagtgatggacctaatcatttgacacacctgtttgccaattgaattggagtccagtttgggggctaaattccccaaatatttcctgcttcacaagtcacacccccaaagcactggccagtcggtaacatcagagggtctcctacatcccaggacccacggtccagatggcttctacgccaggcaaccaacggaccgttgtgcaaacacagtctgtggtttctctggctggtgtagaacccagtctggaatgaactgggaagtctctcatagctacatgggggcacattaggaaggagtattatttgccaagcagttaaaatagaactcattgctatttggtttctactaatttccagaataagtgatatcctgtctttttcacgtggtcccaaaaagaaatatttgactattggaagtcaatagacggggaaagtctccttaaatccttctgaataaaaatcttcctattaaatcctacgtgtcaccatagccagttttcatgacaaaccttccatcttggaccacataaaaattcagttaggaggttccaatctaatgctaaatgtttgctcaatgcacttacactggttttaatttagctttccccgtttattatttcatgctttgggtagtgtgactctgagccaattgctgtgagccatagactctgcaaatgcaaactaaatcctatgctaccattcatctcgaaagtcctcattatacttcctaattaaagctcattttacacattcactcatacaatagataggacaatagatattttgagcctccaagatgcatttagtatgataggactggtacttaatcactatgaaagtgagtaagataaggtagacaactgttgcccccacagagtctagtgggaaggactcatgaataaaaaaggtagcaaacagcaatatgttaggagctagatttgagagtgtctcacagtgtggcaggaacacagtggggacacgaaaagtaattcttgcaagggtaggaaaggtttccctgaagaggagacaacattgcaatttattcttgaaagacggatttgtggacagggaatggagaaagagcattcccagaaggtagaaccacatgagcaccagataccacatggagtggtaggaaagctcgataagtctggagaagagtcagtggtccagggtggctgctgtatagggtatggcagggagagtgaacccagaagaatctggagagatacgtagaggtgggagtcaagggtcttcagctaatccagttgtggacactatgaaacagacgcaactgaccagtaaaacctaaagggctctccctcccactcattgttacagctataacaacattgaaaccccaagagagggatgtaggaaggaagagtgtggaccttggtgcatggaagacttgagtgactttctgagctccaaaccttaatatttgtggttttagcaaattatttactctctccaaacctcagtcctcactcaggctcattatctgttaaatagggataagtatggcacctatgtcttaagtaggagcaaaaggagcaagtaaaagaatgtatgtgaaggactcagtattgtgactggcccacggtaagtaatcaacagatgctgagtttgtaataatacatgattgataatatctgatgaataacgtatgattgataataacattaccttggtcagggtcagtagagaaacccagcatatcaggtagatcagctgaggtcaggtttccccatcacttggtttctgagaatagccccggagggatttgcaagttcagccccatcccttggccagatttgcaatgtcaggaggacatggctggcaggctcattctgtcctcagatttcttaccccatggggatcaaggagggagagcccaagccttggattataaagacattcttgcatctccctgtgtaaaatgataatgccaaaggatcctggcaccaggcaagggcacgtggcccccagccaaggctccttgtccccacatcgattactaggtgcctactgatattagaccctggggactgtcttgaaagtccttgtttctttccccttaatgtctttgtttatttaatagctgcattgtacaagtgggaatggtgtgtatttctgtctcctggcagtggtggttgactttaaaaaaaatgttttaatcccagcactctgggaggccaaggtgggaggatcgcttgaggccaggagtccaagagcaacctaggcaacatggcgagatcctatctctacaaaaaaatttttttgaaatttaaaaatattttaatgcactttattttttagagcaactttaggtttatagcaaaacttagtggaaagtacagagatttcccatatactccctgccttcatacacagcatagcctccccgactatcaacatcccacaccacgtggtacatttgttatagtccattgacacatcattatcgcccttcgtccgcagtgtacactagggttcactcttggtgttgcactttctatgggagttgttgacgttttacaccagtagttgtcctgcggaagcctatccaaatagctcggggcaaggctggtgatgctaatttatttccaaataacctgttttggagaaggggtttaagattgagcagaagtgcaaaagaaagaaataaaggcatggaggaaagaaaagagagaaaagagaaaagaccattcactcacccaggccagtcccacccccagtctctgaagctcttggcaggtgaaggctaacgcagttcttgcctaagatgttcacactcttctcctgttccctaaatctgccttaccaccctctttctggagtaatagtgctgccttttcatcttttccttgcagctttctccctgctcaccctccaggtctgcatggtgagtgcccacccccacccccaaactggtatagggcgaagttttattttgagatggaagtctcaggaagggactgaggctcctctggagatatttttttttcatcacctaagataacttattttaattgctcttgcagtgttcttgtaaggaattctaagtaagctcctgctctgacagatgaagccttctgggaggttggctgtcccgggagccctgggtgatgctgagatgtcctttcaaacaggcacccaaacagctgaagggctccagttaccctagaggggagtgacatggacacttcctttgccagttggagaaagagaaggaggagggggagggaggtggtgaagagaagaacaggaggacagtgacaggagggtggggaggagtaaggaaaaccaaagggggacatgaagagccacggcagtcctgcaggctggcggaagggagtggaacatcctttctcggcctgcaccctctgctgtactctaggggaccaggatggcacccttctttaaacctcagggtatgagtagtgatttagcaacacaaattacacccctcctaaagtggcgccattctgcctgactcccctgggggatcattaagcaactgctgtaaatgaagctagccacctgtgtgctagcaagtggcatttgtcctaaatctttgattcaggatttaaatatgtattttaccgaagccatgaattaaaaggcatgcccatttacatatttttattttaccttggttttactcacttggattttctatatatttctatgacaactatggattgctttggtcatgaaaaaaataatgatttttaattataaaaattgaattggccaggtgcagtggctcacgcctgtaatctcagcactttgggaggccaagatgagaagatcgcttgaggccaggagttggaggccagcctgggcaacatagcaagactctatctctataaaaagcagaaaaaaaattagtcaggcgtggtaccttgtgcctttaatcccaactactcaggaggccgaggcaggaggatcacttgatcccaggaagttgagactgcagtgaaccccaaatgcaccattgcactccagcctggatgagagagtgagactctgtctaaaaaatataattaattattaataattaattattattaattaataattattaataattaaatatttaacatccaacaaaaaattgaattggtttgaaaaattttgcaaaactattttagacattttttaaagaaagggaccaaaagatacatgtccaattgttgatctaggttaacttgggggttggggttggaattgaaatgagagatgcgatatagtcttctttaactgtctctgtattgcctgacttgttaaatgaatacctattacttttttaactttttaagcaaattcaagaaagaaagaaagttaaaagaattattttgcgatgtgtttttaaaaagcaaggctgtttcatgaagtggaatacttttatctcactattttttaaattatataaaatttttagttgaacttaaaaaaaaaaagaaaaaaaaaaagacaaggtctcattctgtcacccaggctggagtgcaatggtgcgatcatagctcactgcagcctcgaactcctgggctcaagcgatcctcccagcttggcatcccaaagtgctgggattacaggcatgagccatcgtgtttggcccttgggctttattttattaacaacttagcaaattccttctgccaattttctttgtgtctgcatccctaagaaacattgagttttgcatttgtctctcaataggagaaggcaggcttttctgtcataatcagatatttctacccaaggaattcatgtatatatttttgactcagtggcttcaatggcttaaataactttatttttcaactatgaagtttcaaactgacagaaaagtttgaaaacataatttaataagtctccatgacccaccatctagatttaacaaatgtcatttttcatatttgcttcagatctttaaaataattgcaataataaaatactgtacttatctcctgccttcatccaggagcaactgtctccctaaagttggtgtgtatcttcctgcccagtgctttacacttttattatatgtgtttatgtccataagcactaggcactattgttttatattttaaaactatacctaaatagtatggcactatacatatatacatatatatatttttatatatattaaaaatatatataaatatatatttatttttttatatttttatatatatttttatatttttaaatatatttttatatataaaaatatattttatatatttatatataaacatttatatttatatataatatatatatttatatataaaaaatttatatttatatatataatatatatatttatatatatattttttgctgcttttcatcaatttttgagacatatataactcttattcattcattttcatggctgtatggcatttcatatatgactctaccacaatttatctatcctgtttatccagttgatggacattcaacgtacttctaatttttctctattataaaaaattaagcattgaacatccttctttatgtcttcttgtgcactggaatcagaatccatccaagggactttcctaggaatggaattgctaggaaattagttggttgaacagtctttttaaatataaaagtgagagagaaaaagagaattgaacaaggtcttaggttttctttagatttgttggtttagataaggattccaggtcatctcattttaccagagtacaaattctccaattcctttcatcgcttttctcccaaatttaaaaactgggaaacctcttaattaaagccctgattatggagaatttgttcaaactcaaagaactaacttatcttgaagctcaactgagacaggtgaatacgttgtttttttctctcctttctctcagaatattgagtatcactttagaatatattaaacaacctatcaagattaatgagcttattcagaaaagaaaataagtcctggtaagtagaataataaatttaaaattctgaatctttaaacccaggctgaaagatggcctctagtgtaagctgcattactgtgctgtgactttatgagccttctgtaatggtatttttcccctcctgctagatcaatttcagcgtgtttggaccagcagattccaggtgatggataggcagcttcattttaatagtctgttggtacagggtgacctgtagcctttccagaagaggtaaaatgaatcctccggttgtcaccccctccttcctcgctccaattccatcattaatccccgtttgaggatttgagtgctgccgaggactgacagactccatgaggttcagctgctgcctggtacatgtggtcacctgcagcttcttcagccctacatgtgagtaactcaggacaaaggtctacaacacctgccctaaatttccccaagtcttcccagcactcccagtacctcagtcttctgtgttttaaagtgtgatacatgcacaaggcgtgatgtacagcaggagctaaggtggtcgactgcgaagtccatcgcatcttaattgttcttaattttaaggtgtattttacagattttattgctgaagacaaggctaaacagcattacattttaaaaatcattttttaaaaaaagtacatagaagccgggtgtggtggctcacacttgtaatcccagcactttgggaggccaaggtgggtagatcacttgaggtcaggaattcaagaacagcctggccaacatggtgaaaccccatcttcactaaaaatacaaaaattagctgggcgtggtggcgcacgcctgtaataccagctactcaggaggctgaggcaggagaatcacttgaaccccagaggcggaggttgcagtgagccgagatcacgccactgtactctagcctaggtgacagagtgagactctgtctcaaaacaagtaaataaataaataagttaaaaagtacatagagatgcatgtggctgtgacagtattgggaagactgtattcaaatgactagatctgggagacactgattgaagcaaagcacactctgacttagggtcctagataagtccctgaatttatgtgagtgaatgttttctgggcacattctttcagttccttgggtctcagtttagcccctggaaaatgcaggcattggactagatcagggattctcagccctgccttcacctttgaatcacccggacaaataatgaaaaatgctggcatctgggggccctcttcaaatcaatttcatcaacaacttagggtagggacagggttaggccaggcatcagtatttttttttttttttttgagacagagttttgctcttgttgcccaggctgaagtgcaatggtatggtcttggctcaccgcaacctccacctcccgggttcaagcgattctcctgtctcagcctctcgagtagctgggattacaagcttgcgccactatgcccagctaattttgtatttttagcagagacggggtttctccatgttcgtcaggctggtcttgaactcccgacctcaggtgatccaccctcctcagcctcccaaagcgctgggattacaggcgtgagccaccgcgcccggccagcatcagtattttttaaaagctctcccagtgattgtcatgtgtaggtagcattgagagtcactaagtaaggtgatgtctgaggttcctttcaaatctaaggttgactgattttctgatcccatggatagactgtaaatgcaaagtaagttctgattcagtagcagtggaggaggctcattgtccctttcaggctcagccataacaagcgtgatgtttctcacactccaggattgggtcaacactggtctgaaagctccctgagggcagaggctgtgtcctttatctggctttcaccagttcctaccatagtgcttggtagacagtaggtgctcaataaatgttagatgaaagaatgataggttggagctcaggaatgtgatttactagggcatctggaattaatcaagtggtcagaaattggtccatactaaccaaactcgcaaggcactgaattttctaccagaattccagttgattattagtttattaagggaactcttctgggtccaggaagtgaaaccaaactctgttccagaacattctctttgtggtaaacaatatcagaaggtcgcttggtgagcacagaacaaaagttggatttttttttttttttgagacggagtcttgctctgtcacccaggctggagtgcagtggctcggctcacagcaacctccgcctcctgggttcgtgcaattcttctgcctcagcctccccagtagctgggattacaggcacccgccatcatgcccagctaatttttgtatttttgtagagatggggt[136 bp omitted]atcaagctctgaaggtctgatggctggacctccttctctgtaagcctgtttttatgtaaagtgtcaggatcagtcatccagaatcgtagtgggtgttggacctcctggtgacacgctgatagattttcattttccaccttcccctttgcaaatactcatacgaccactaccttgccgtttgcactcttgttaccataacacacagtttcctaagtgttggattgttttgccgcttgctaatgacatactcaagagaaacacttcaatctcctctgcaaggtcactccaaatcactcaagcaagacgggttacttctggaaagctgccctgtagacagctaatcccatccttcttgcaggcttgacttacggagatggcatttgctgaccttacgtttttaagagccatcttattttgagggctctagcactttgcccaccatctacaattaccatgactaaaaatacctcggagggtgaagaatcttcaaggggactttgcaagttggagaccgtattccttctatttcagtaccatatttcaaggcaatagccttgttcttgcattgagctacacattacctgccagacgaatatttcactttacagttgattggaagccaatcttgaagcggaaccttgtgattatgtcaccattgcccccttgaatgtacccaacagtgattttcttgacagcacctttactgcttagccactgtacgcagatttggccaccttccctgtgcaccttgccagggctgcattttcccccatgaaaatggaagcttccatcggtgcgtgtcggccgcaatcctccaagtaccatctctgtcttccaccgcccgcatagtataacttgagggcttccacataaacctaggataggagaaacagagatgtattttgttacctaggagctggtatttgtctggaggaaagtgtggaaggtgccgctgcaggttcaaacggagctgtgtgcatggcacatctttttaggccattgactggagcagtggtgtgtcactcagagtcactcatgtgcaaataggttgccaacctctgattgcaggcttaaacatgtgaggctccaccactccctgcccatttctgagtgtgtttaaataaaaggaagtgctt[131 bp omitted]tggcgggcgcctgtaatcccagctacccgggaggctgaggcaggagaatggcgtgaac[149 bp omitted]tttgaaattaatttatatatttcttctcctataccttcagtctgactggactgtaggggaagtgtgtgtgtgtgtgtgtgtgtgtgtgtgtgtgtgtgtgtgtgtgtgtaggtacctgtatgtgaatagaacattcatggaagggcacacaagaaactgtaaacagtgcttactttagggaggggcatggatgaactgggataccaaagagactatttttattttcagatattttgtgctgttttagactgctctttcttccattaaatgagagattagatctgaatggccacgtgatcttctgagtcccatctgtaagaatctgcatttccacggaattgggggtatgttttatattttctttctgtaatctttttactttactgaattcaactctgacgattatatagaaacacctcatttttctagcattacctgagaatgaaatttcccacactgggaattctccaggtaaatgaatctaatccctttatgttgttgaggtttgaagtaatttctaatgggatatttagaagctgcattacatacccccccccccctctttattttacagcttgaggagacatgtttcacatgccattaacactcacctattaaaagttcagtggttttacgacagtatattcactgagatgtgcaatcatcaccacaagctaattttagggcatttcaacacccccaaaagaaactccatactcattaagcactcactccccattctccccttctctcaccttctggaaaccactcatctatttctttctctgtggatttgcctattctgagcatttcacatggactcatacaatgcggggtcttttgtgtttcctatcctcttaaacagagtgcagttagtagcatgttactttttctttacgatttaggattattatgattggcattgtgccaagcccatggcaaccttgagaaatatttagatagggcccctgtttgcctcttatagattccatggcccattaatgtgcctgtggctccctttgggctctgtggctgggccaccaggtgactgctgaacactttgtcttctgatcctgaactctcatgttaaccattatttcctttccagtccccccatgtctgcaaagttggtcataggtacataaatgagatcaggtctcagccctcacgccttcgcttgacccagcctcataaggtcactccactgcgagcctctctggtgtgtttctgcctttctcctggagtgatgaaacaggctgaaatcttttcttcttgcattgctatcttcagcatcttatatcattcagtcagctaaattccatctttgtgataaatcccccacaaatattttgtgatctctctgatctaagcagtgttaaaccttttgattccttgtatccttcctctcccctttcttaaaatagtctgtagcgctcatgtcaaggacctgctcagcttccctttctctaaaattgcataatcctacaagaatattttcccttcttttccttcaggagcaaacgttctcaaaacattcttaaatgcaaacccgcaggcacagcatgtgtctgtcaactccaagagcatttggatgttcgaagggagaggatgtttgacatctaacccgtcgtggaaagaggagcctctgtgagtatttctttacttcttggtaggaatagggtgaaggaagaagagtctgatttagggtattgtcacagctctgggtcagactcttatgagggttatttgaggttagatgagtcaacttggcagggagggagtggttactgttctgaatttggctaagggagcatggcagggtccaactacagtatagtatgggaatttcaggttggggggcttctcatcttatgcctgttgtcagggtaagcccgtaagtgtgggggcacccttgcagagagtagcccaggttcattctgaatttggagagaccaagaaatttcagtccgtgtcagagaaactgatccttggttgggcctgacttgggctggggaagggatggcaagtagaacagtgcttggcacatagaggtaccagaaatatctgctgaatgacggtgccgctgatgtcactgagcggtcggtagccacggtccgtcatgagaggctgagagagattctcaggccaggcttggcgggaaatgctgtaatttacgattgctctgccacaggtgcaggtgagtgagtggaaggggcacgatgcaggtgcaggacctgtggtgggacgtcagaactggagtctgaatatgttgcagtgaccctcagttgcagacgggaatcagagaagagtctgggcacatccacttttggataacctgacactaagggattctgctgagctcagacctgggcagattagcagacaggacacccccaggctcagcccaaggtggttagaattgaggcagcctccaccgcagctaccctggtgggcctgcatttgacagaccataaagtgattcccctcataagtgacccaaccctgccttctggtggtcatttccatcaactgcacctgggtttaaaaggactggtgtgggagctccttttcctcaccactctcctcagctctcctcagcactggggctttaggactaattttactaactcacatgaacccagttctgctgtgatgtgagtgtaataagcaggaaaagtcaatgtacttcaagactccatctggttccacccattgtctgagacaattcagttatagttataacatgtgacaggcatcatgcagggccttgaatttgcttcgtagcagaaatcttttaaggcaggtactataattattcacgttaccgaggaggaaactgaggctcagagaggcgctgttattcttgctgcaagactatgacattcagctgggtgcgatggctcacacctgtaattccagcactttgggaaggtgacggggcaggatttctggagcccaggagtttgagaccagcctgggcaacatagtgataccctgtctatacaaaaatttttttttaattatccagacgtggtggcgagtgcctgtggtcccagctactggggaggctgaagcaggaggaacacttgagccagggaggtctaggctgcagtgagctgagatggcgccactgcaccactgcactccagcctgggtgagagtgagaccctgtctcagatagatggataggtaggcagatagatagatgatagatagatagatagatagatagatagatagataggtatgacattcagttttgggtgccaccaacctgttaacaatggcacctcctcaccttaccccagtccatccttcagacagtggaattgaggagaatggacagggaggggcactttctattttatgttttacaaatgtatttttataatgagcatatattatctctataattcttttttaaattgtagactaaattctgggtgtcatccctgatgaagggatcttgccagcctaggaaggaggaggcaggatacaggaactggagctccttcaccttgagagaacaggggttcataggagtatggtggctgtctaatgaccctggaagatccaagagagcagatttattccgtgtgtgtctccagcgcccagacccagggtcaggaggtggagttctcaaaacgggagttcagctgtgtgacaaagcatcttgctagccaggaggggctgccttctgctggaaaaagtgggataactttgaaagaacttaagctggaagttactgggatgtttatacaggagagtcag[136 bp omitted]acgtagtgaga[187 bp omitted]ggcatggtggcgggcgcctgtagtcccagctacttgggaggctgaggcagaagaatggcgtgaacccgggaggcggagcttgcagtgagccaagatggcaccactgcactccagcctgggcgacagagactccgtctcaaaaaaaaaacaacaaagcagaacaaacaaacaaacaaacatacaaacaaaaacatggtggcgtgcgcctgtagtcccagaggctgaggcaggaggatcgcttgagcctgggaggttgaggctgctgcgggtcatgattgcgccctacactccagcaaagcctttgatattccggtctcccagtctgtgatcctaccagtgggctgcagtacccactcctgcctctaggtggcagccttggctctgtaaaacccaggtctgtttttggtgccctggttcccacccttggctgggtattgttttcatctggagatttagggtattgcaatctactgatgcctggggctgcacctccggatattctgatttaattggtctcgggtgggacctgggaattgggaattttgaaagctcctcaggtggctctaagccaaggtttggagtgactgagtgcttagaccctgccatttctgtgggttcggtgagcagattgtttcattttattttctttcactgtactctgcagggggagactggacccatggagagaaagtaggagcattaaaagagatgtcaccagaagctacaaaacataccagctcattaagatagagacaacaaaataggtccctctaaaaataggagagagagaagaaacaggagcttaaacagtgcccatgaaggagttacaggcctttaactcccccaggaagtgaatttactccagccatgtagagggcaggggaatgttccagaaggcagggtgacacgctggccgggggccagagacctctctctttctggtagctttagcatgcggccaggcagtggcagttccggaattcaggactctctggggacctgcgggtatgggctggcagaaggggcttcacagggagaataaggggcttgcggggagttggttccagccagtgacagtgaactgacccagcccaacacctctgtccctaggcatggtggctgccctcatatctgccccagcccagcactgggatctcacagagaaaaagggccttccgtaaaggcagaaaatagctattgccataactcttcaagatgctgggccacaaaccacattgctgcggcccaagcccggactagagggaggcaagtgaggcaccctctttggcacaaaatctaaggggactgcaaaaaaccctcattaatcaaggccaggtgcggtggcccatgcctgtaatcccagcactttgtgaggccgaggcgggtggatcagctgaggtcaggagttcaagaccagcctggccaacatggtgaaacccagtctctagtaaaaatacaaaaattagctgggcatggtgccgcgcacctgtaatcccagctactagggaggctgaggcaggaaaattgcttgaacccaggaggcggagcttgcagtgagccgagatcgtgccactgcactccagcctgggcgacaaagtgagactccaactcaaaaaaaaaaaaaaaaaaaaccaaaaaaaaaaaaaccagaaaaagctcaataatcaaaattaatcatattgtattgcaatactttttaaaatcaaggttagtgcaaaaaacacccatgattaacaaaattttaaatgaagatgggatgggtgttcctgcctttatgagcctaaatggcttctcttgcctttactcctctgtggcacagcacggctctggacttctgtaagggagtcttctatttttcacccacaccttgcaggagccaccagtcagctttggcacctcaagaactttagcactcagggtgaggccaggctagagaccctgatgcctggcagagcagcagtgccacctagtggctcacgcctataatcccagcactttgggaggctctagtgccaaggcatgaagggtgatgccagacagagcaacagagagggccagaagctgtccggaagagagggttttccagagcacaggagcacgggagcctctgcatgggcagctgcacgggcggagctgaggtggggcagcagggaggctgaatgaacagatgaggcaggagcagggaagagtcagtgttgctgagactgatttttcctgcaggcagaaaattcccatgcacagtcttagcaccgccacaggcagatggggtgacctggaagcagtcgcccctccttgtcctcatctatgaaacaggagggtcagcacagaccgtctgtctctgtggcttgcatattcttcagaacttgtgcccaagtttccatttccagggacgggtgtgagaaatcagcttccgagcgacaaaacagtctcctgttggc[138 bp omitted]g[314 bp omitted]gcctcccaagtagctgggactatgggcacccgccaccgtgcccggctaattttttgtatttttagtaaaggcggg[142 bp omitted]ttgttttgttttttggagatggaaagtggtggggagattgtttttgtttttgtttttgttttttttgttttttttgaggcggaatcttgctctgtcgccaggcaggagtgcagtggctcactgcaacctcggcctcctgggttcaagcgattctcttgcctccgcctcctgagtagctggaactacaggctcgtaccaccacacccagctaatttttgtatttttagtagagagggggtttcaccatgttggtcaagatggtctcgatgtcttgacttcctgatccgcccaccttggcctctcaaagtgctgggattacaggcatgagccaccgacccctgccaagattgggttttaaagtcttaaagctatggcagggtgctgtggctcaccttccttctttcattgtctctctctctccttacttccctccctccctcccttcttttctttcttctttctttcctttctcagacagagtcttactctgccacccaggctggagtgcaatggcatgatcttggctcattacaacttcctcctcccgggttcaagtgactctcccgcctcagcctcccaagtagctgggattacaggcgtccaccaccatgcccagctaattattgtatttttagtagagatggggtttca[139 bp omitted]atcaccgaccaccacatatccaatccgagggagaggaaggaggaaaggacttctccatggggatgtcctcacccagcctcgagattgtgactttctggaaactttagtaacaaatgctgcctgtgccaacagcttagcacttggttatactgttaattaattcccagaatcttagacactagggtggcaaataggattttatgagtgcctgagtgccagagaagattagcaagagaaaaaaaaaaaaacaaacaaaaaaaaaacagaatggagaggtttcactcttggacatggagttttgagaaatcctccagggcctggttctcagagggtggtccctggaccaccagcatcagtatcatcagggaacttgctagaaccgtaaaaccttgagccccattccagacctgagaatcagaacctggaaggtggggtctggtgaggtgggtttcagccaacaagccctgcagagcattccgaggcatgttcaagtttgagaatcactgatttagagccatgcttctcaaaccccgctgtgcctgccagtcacccagggatctcattagaaagcagattctgatccagtcgcctagggagggttctaagactttgcagttctgacaagctcccaggtgacacaatactgctggtctttggaaaactttgtgtagcagagatctaggcctgcatttcccagacaagctttatgatgaaagtcacctgggtgcttattaactatacaagttaccaggtctctcccctggaaattcccgttttgtggatctggctttgggcccaggaatccgctttttaaaacaactgctctaagagtttacctttaggcagatgattagaatcaccagggaacgtttcaatgcagattccccagctccaacccaacctactgactcagaatctctgacggtgcagccctaaattctgaatttttttttaaagaaagtaaaccaggcagccaggcatggtggctcacgtctataatcctagcactttgggaggcctaagcgagtggataacaaggtcaggagtttgagaccagtctggccaatatggtgaaaccctgtctctgctaaaaatacaaaacttagctgggtatggtggtgggtgcctgtagtcccagctacttaggaggctgaggcaggagaatcgcttgaatccgggaggcggaggttgcagtgagccaagattacgccactgcactccagcctgggtgacagggtgagactctatctcaaaaaaaaaaaaaaaaagtaaaccaggcaatgctgatgcccagctaggtttagaaacccttggaatagttcagacctctcgtttttcaagtaaggaaccggaaacctggagagtgagatgccaaagattatgaaagaaactggaaggaaagtgaagactggaacagagattttctcattcctgcttgagtgttcttccaatgactgtgtgtgtgtagctttgaaaatacaaagtattgggaataggaactgtgatacaaacaaaggtaagtaggacagtgtaagtcatgactgctactcagggagagtagagggagtatttaaaaatgcccctaaaaaggtgcacaaaggataggggcgtagccactggtgggtggggaggaccaagacagcctgaggtgtgttaagatttcaaggggagatggctgggcgggagtagtgaaggggagccacatctgcgggcacacgtggaaggacaggttgagtatccatctgaggcggcctggcgtggtggctcacacctgtaatcccagcactttgggaggctgaggcgggtggatcacaaggtcaggagttcgagaccagcctggccaatatggtgaaactccgtctctaccaaaattacaaaaattagctgggtgtggtggtgggcacctatagtcccggctactagggaggctgaggcaggagaattgcttgaacctgggaggtggaggttacactgagcggagatagcaccactgcactccagcctgggtgacaaagcaagactctatcacaaaaataataataataataataagtatccatctgaggcaagtgtactaaactgatgggccgggagggggcattcacagttgctgggcagagcagtgacaggtcagagttgtgtttcaaataggcctaagtaggactaagttgtattaactaacttgaatggactcagctgtaacattgtctgtcttgaacactacacactttggggccaaatggttggtgaaccatgtgtaccccagatcaccagctcttcatatcaccatgcaagccaaaaattcgtttcaattgagccatgacatgcaggaagagactgcccaaaattgcttcttcctttttctgtaacacttaatattcaaactgtctttttaactcagcaacacaggatgatttaaactatagacctagtattaatatttccttacagaggtggcaacagccaccaaaacaaacaaacaaaaaagctcatgttcatctccacccccatatttcagacagtgacatgaaggcaatggattctcagcattacaaggcaagacagaacttgaaggaagaaggctgggaggaaaccaatgttgaatgaacactgactctgtgctcagccctgagcaagcagtggaatgcccctgggctgtgagccacgaattcaaatcccagcttgtagagctgttctgggggttagaagtttggggtccctcgttgctgcactcgttccaggtttggggctggcgctgcccttctgacccctccctaaagtggacacaggagaaggagcggggagaagagacaggcggccaggagacaccctgttgagggctccctctgcttgcaacaggacctgctgaggttgcagctgaagtgctggtcttcccagagaaaacaacccctcattctcaaaggatgagagtgagccctgcggggctgcatgctcttggccatgggagatcaactgtggtcacatagagtgtaatcagtgtgtatttatggatcactcactacatgcaagaccgggacacagccgggatttactgtggggctgaaagcaagtcacttaaaaaggtaaaaattcatgtccttttaatctacttttcagcaaggaacatcacgtctgaatgctcgcggcctctgcctgccccgtgggatggtgctggaaattatactcatatttagatagcattctctgcaagtggctgctgttgtccttccatcgtcagcacaggcagatgctgggagtacccaccttggggtgaggtggcaagagagggccagcttgtatccgcctcgttgtcgtccttccttcctgacttgactctctcctctgtggccttctcaggagtgggatgtggttgtgaggagaatgtgcactttacccctcaccagtccagagaggggcacatagcccaaacctctccccttcccagaaacctgcaagtccccctgggtgcgcctgtgtgatgaggcaggctccgagagccacaggctggtgggccactaggaagcagtaaaggaagacattttatgattgtagctggagataatgaattgaaaagctggtctctgtttctggaaatgatgccaggaggccctcaaaataaacgcccacctgtccttcaggtctcaacacctgttgctcttgggacagagatcccaggcccaaaataggcacagctgctatggatgctcgtcttgccctcctggagctgagactgggccatgtttggaaatatgtctccctccatcccctcctcccatcctcatttggagccttagggctttaagacgtgagctctttcctcgctccctctccccagtctttcttgggtatctctgctcctcccatcacctgttcctgggcatggcataggcagttggtaaatgacagatgaatgaatacatgtacaaggaaacacagatctgaaatttctagcagcaaagtttggagcaggaagctctggctggccctgggctttttgctaagggtgttctggcttcgcgtggcagcacccctccccaccgggcctttgccaggacgctcgatcctctcttcgggcttctgagcagtgtgaattgcaaacagccatgcccactccccaggccaagaaaaccaagttcatggccaggattgctcacaaaaaaaaaaaaaaaaaaagaaccacttctgccttatcattctctctttattaccgaaatgcggagacagaaagtcaacagagaaagaattgttttccccaaggccacacagattgctccaacacttgacttttcctgctaggaactcaatccaagagatgggctttcttttgttctctgactataaaagggtgtcaccttgtcaccatcttctatcacacaggacccctatgggcttggtttggttttgttctttcatcattattatttggaaagttatatttcctttactgtccttgaggtgtgaggcttcacctcatcttgtctccatatccctgagtcactaaggagtcctatgtcaatgacacctctccatatgctttacctaagctgccccttctctcagcaagttcgcgccaggcttccccatgaaggccacctaagggtgtctatcgtccccctcctaaatctccccaggacttttgaacaagggccatgtccagtttaatgtcacacaaagaagactcatcaaagcccaggagttgggagttcttgctcctcactgccatggaaagcatgaaacatctgagataaaaataatctgtgccatcccctggctccggatggacagcagttggggcatgagcgcctccagaatgtctcagcattgctgagggtaaccggatcgccgctcagatccagcaggcagcctcagaacctcccagctgctgttgtttttagcaccgggattattggtaggggtgtaaatagacatctgtgttctgggtggctcgctcaccccacattcctaggcacacttgttttattaaagctctcagctgtcgggtgatccaggcgtggagaaatgaaaggccgccctcaccagctggtggtggactgcaaactgcaaccagttttcccccataaggacatgttactcctattagaaactgtgtccctcacatgtccttaagaagcgggccatctgccaatcataaatcgagatctcagccgttccaaataaagaaagagtctaccctccttgctggcagtccttttatagttgacagatttttttttttaatcttgtgcttggccatgtatttcttgtgtaattaaaaaattataaaaggtaataaaaaatacaaatccactgctaagagatttaagactcaataaaaatttcagaaagccagaggtttctggatagtatgaggattacaaggagaaggttaataaattccatgtcccaacaccagaaaaaaagaataaaagagaaaaaacaaggctatttatgaaaaggaaaagtaattagaaatggcccttaatggctgagtgtggtggctcatacctgtaatcccagcaccttgggaggccgaggcg[131 bp omitted]gaggcatgagaattgcttgaaaccgggtggcaaaagttgcactgagccaagatcgcaccactgcgctccagcctgggtgacagagtgagactccttctcaataaaaataaaaaatataataagaaatggtccttaatttggagaggctcacccaaaaaagtgagcctgaagagaaggcgcccttcattcttttgccaccctgttctggagcccatgtacgaaagagccagtggatattgcaaatgagctaaagtcacccaagttcctactgaatggtcaaaggtcctatcttaagagaggctctctgaggatggggtgggctgaggtggtggacaagaggagggttatagagaaacacctggaggacgctaacagaaacagtcgatcatcaaaaagaaaacacgaagcacgctttgggttctatcagcccagtttcaacacagctttaccctgtgcgccagctcttttgagggatttcgcctgtctatgtggccggctgccccggtagaaggttagtactttgtagggtaaaggagtcttaggatctagagagaatccagctctgccattttgaccttgaacaaatcactgagtttcgtcttttcatctgtaaagtgggtgataaggtccatctcctcatcgccaagtctgtatgctgagggcacgagagagtgcatgccaagtgcacatgggtggagttcagtaaatagtggctgatctcatcctcctcctctccatggtcggaggagaccccctctctggctcgtgtggcacggcagctcctgatttggaatggaattggtgctttcattttttgcttcttaataacacagcttacattttctatagtcgtgggcatcctttttttatggaataaatgaacatgggtgactttggtcataatattcactcttagaaaatgaatcttttcatttatatccttcacaaaatcagagcctaatagaaatagtcacaggtcacttccagcaccaaactccgcaccttctcctttgtgggaaatgtcacactttgccaataagtggacacagggggttccacggccccaggtattttcaagtgcagaggcactccagttctgcataaaatgcatcaggggcctcttttattaattctttaagtcataagttctgtaaaataagtttacttcaacgatctctcgcttactcttcctttctggtatgtacatattttaccaccttttttttttctttttgagacagagtcttgctctgtctccaggccggagtgcagtggtgtgatcttggctcactgcaacctccgcctcctgggttcaagcgattctcctgcctc[134 bp omitted]gcctcccaaagtgccgggattacaggcgtgagtcactgcgtccagcctttaccatgtatttttaaaagataaggactatcttagaaagcataatcacaaaatcacattataccgtgaaatgaacaataatctcatgtcaccatcaatatccagtcaatagtcaaatttaccaattggaccgtgtgtgtgtgtgtgtgtgtgtgtgtgtgtgtctattttttaacagcgtgtttgtacaaagcagtatcctaacaaggtccacacagtgcaattggcggataggtccactaagtatcttttaatctacaggtctcccttgtatttgttttatattttttctttgcaatttatttattgaaaaagctaaatgatttgttgagttcccccacatctggagagaacaccccttggcctttcattctcacctgagtcaaactaggtcccctaatcttctggaatcagacaaagaagggaacttggcagctattgctaataaatttactgatgacaataaacaaaggatcccaggctagaagatgctctttctagtagcaagtcaaccagatagttatttgacttcctgccttccttccctcttaaggtaaagacaaggttatcttgggtcaggggtgggattttctgttgtgcagctttgaaatagtgcacactgatctaagataacagtagtagatttagactgagcgcttgaaggggccagcctcttttttattcatttatgtatttttgatagcacagtgcttacatgaacagctgcccaacaaatatttactagatttcagatgtatttccccactagaatgtaaagaaggagaatgtgggcctttgctttataaccttattcaactcaagacaagggcttttcatgagcctacctttgtgtttccttcatgtcatattaagagatgactcttttgaaaagctctccctcccattccccaccaaagcaaaggttaacccggaagtttttttttttcctttttgatttaagccaaaagccatctctccctccgcacatgcacacaccaattgaatttaccgagccatctgcttacaaagctttcacctccgagcatacaaaccatcaaactaggaaccatttctgcatggggaagaggaaaacaaatacagcaaagcggccccagattgaaacaaagcaaagtttattgcatgtgaaaaagagtcacatggacattaagtatcaatggtcaggaatcaagaaaatatacattttgcatatcttctgtcctgctccagaagggctggctcactcttcactctcgtggaccaccatctaggaagaaagtaggcacctggagtcaagtcgggtggcagagacacattcccacccaccacttctgccggctggcatcagagttgcttgcctacttcagtgggacacaggatattttttggaccttgggaaaacgcacgattgcacacatgaagtcaccccatagcctgagaaactggccctccgaaagagcaagccccaaacgctggagacccagcgacctactgtcggatgctgtgtgttcagcgggctctggagggggctcctgcagcagccttttgttaccagcagggggcgcatgaaagagctcagtgggacccgctcgctccttttcaggatggcggtttgttttgttttgttgggatacatgtgcagaacgtgcaggtttgttacataggtatacatgtgccatggtggtttgctgcacctatcaacctgtcatctaggttttaggccccacgtgcattagctgtttgtcctaatgctctccctccccttgccgcccccacccccggaaaggccccggtgtgtgatgttcccctccctgtgtccacgtgttctcactgttcaactcccactaatgagtgagaacatgtggtgtttggttttctgtttctgtgttagtttgctgagaatgatggcttccagcttcatccatgtccctgcaaaggacatgatatcattcttttttatggctgcatagtattccatggtgtacatgtgcaggatggcggtttttattgtgactcacagaccaggattctagcgagggtccagtcagctaagtgactttaagcactttctcttcctgagcctgagactccccagctctaaagtaaagggttctctgaggttccttccagctaagaagtttctacagtccctgggggggggctcctcccagctcagcgactcaccctgctggaggtgaagtctcgagtcttagcgcggagcttgttgacttgagattctgcgatatccgcacgttcctcggcctcctccagctcatgctgagcctttcggaatttggtgagatgagcattggcttgttcatcctaaaaccaaagagcccaggcaggttatatcagcacgcgcctctctcagaactcaccacgggaaacagcacggtctgcctgccgcagtcagcacctatctcacttacagcctcctccgcctgcctcttgtaggacttgactttcacttgcagtttatccaccagatcctgcaatctcagcacattcttcctgtcctcttcactctaagaatgagaaagtgggaatgtcactggagaggagggggcagatttgcacacggcatgggcagctttctgggccaaagtgtttcttcctgtggtttgatggagaatctgcacgtcacagaggacacgatcatggcgtttgcgttccacttacctggtacgtcagctccttgaccctccgctcatacttcctcaggcccttaacagactctgtgttcttcttctgctctccctcaagttcaaactccagctctcggatctgggggagagggtggggaaattagtctggggctgcagcgtgattgggaggctggaaagctcagcgcaggcggggttcctcctgcacacaccctggtctccagtttctggatctgcttcttcccgcccttcagcgccagctgctcggcctcatctagacgatgctgcaggtccttcaccgtctgttccaggttcttcttcatccgctcaaggtgggcgctggtgtcctgctccttcttcagctcctccgccatcatggcagcctgaaaagcacatgggacttgctaggatgcagaggaagctccagtgccttggaactgtcaaaacctggggacctcggaggaccagagaccatgctaaagaaaaaggacaggccaggcgcggtggctcacgtctgtaatcccagcactttgggaggccaaggcgggtggatcacctgaggtcaggagttcaagaccagcctgctcaacatggtgaaagcccatctctactaaaaatacaaaaaattagctgggcgtggtggcagatgcccgtattcccagctactccggaggctgaggcaggagagttgcttgaacccaggaggaggaggttgcagtgagccgagatctcgccattgcactccagcctggtcaataagagtgaaactccatctcgggggtgggggaagaaagaaagaaagaaaaaggacaacgggtgagactgtgatgaagcacactctgccaccctggaagagggccagagctacacccagtagataaaataacctaatcaatgaggcaatgagaactttagcgacaggctgggaaacagtttcttccctttcttaagctggcctcctttgaaactctcccctgccccagggaaattcttttttcattaccaccaatatatattttcaaaggagcttgagacttagagtagtctgacttgatactcagcctcatagatttggggatagtgagattaagggaaggcctctggagaattaaggctgtacaggaacaacaaaatcgcttcgaggtaaagttctcccgccaggcagcaggtggcgccattagcgcggtgggccgccgggagaaagcctcggagacccaggaagggaaaaatgtgtgggatattaacacctcaggttcttgttttcatatttggaataagtcagatgttgaaggaaagacatgcacacctctccacaggcagaactactaggatataatcccttcctgcctttttttcttatgcccttcttctaaagtgcaggagggaacaggggagtttgagcggagatgggagccctcggggagcagaatgtgcaccaggtgtggctgggggagaccgcacctgtctaactatgtgagggctttaatgcaatgcaatcccggcagcccgagggcagcaggaaggagacgccttacgtccgtgatggccttcttggccttctcctcagcgttccttgcatccctgctggcatcttctacctcactctggagctgcatgaggtctgtctccagcttcttcttggtgtggatgaggctggtgttctagggcaagaggagggctgttaaccaggtgcgtatgaggctggaacctcgcctctcttcctctccctcccctcacctgggtatgcagcagctgcaccctctcgttggagtccaggagctcctgttccgccagtttccgggccctctccgtctgctccagagtagcccgcagctcctccacctcggcctgcagcaggttggctctgcgctccacaatcgccagctgctccttcaggtcctcctggccccggagggcatcatccaggtggagctgcgtatcctagccagagaaaaacgaacattctatttgaagttgaggcgttaggaccacgagcctcatctgcatctctgagttttgtttgtttgtttgtttgtttttgttttgttttgttttgtttgttttgagacagggtcttgttctgtcacccaagctggtgtgcagttgcgtgatctcagctcactgtaacctctgcctcctggaaagcaatcctcccatctcagcctcccaagtagctgagaccacaggcttgtgccaccatgcctagctaatttttattttttttgtagagataaggttttgctatattgcccaggctggtatcaaactcctgggctcaagtgagcctcttgcctcagtctcccagagcgctgggactacaggcgtgcaccactgtgcccagcctacatttctgagtatgtgaggaggagagaggtttttccccgatgggttctctcaaaccttcagctgtccctggacactcctgaggtgtttgagggtctccgccgcctggcggttggcgtggctcagctggatctcgatttcattcaggtccccctccatcttcttcttgagccggatggcttcattcctgctccgcacctcggcgtccagggcgctctgcatggtttccactgttctctggtagttcctcttcagctgctcgatctcttcatccttctcggcgatctttctatcaatttctgatttcacttgtgtcaattcaagctggattcggaggatcttggcttcttcatgctcaagagcagcctttaagaaacaaaagcaaatcaaatagtgtctgtgatggtatggagccagctccactaccctgcaggataacaaaacttcaatggaatagtcctaaatctaatcctacaatagtc[131 bp omitted]tgaaaccctgtctctactaaaaatacaaaaattagccaggcatggtggtgcccgcctgtaatcccagctactcgggaggctgaggcaggagaatcatttgaacccaggagacagaggttgcagtgggcctagattgccagcatgggcaacaagagcaaaactctgtctcaagaaaaaaaaagtcccaaatttatcttcagtgcagaaataaaagcacgtttcattgctttttggttttgattatactatcaaccaataataatgtttaaatcatatttcttaggagcataaagcactttctagatatttttaattcatgtaatattttgtaaaatctcatctttaggcctatttaatatgacagtcttctccaataaatttaagataattcacaggtattattcagcctcacagttttgctgtgtgacgggaaagcagcaggcattaggactgtgatttgacaaaggcaaaaatggagacacagcatggagcagccagcctccctggccgtggctcaccatggctgcatctgcgcctgagcctgcctcccagcactcacctctgcttcctcgagagccagctggatatcagccttttccagctcaatctgctttcttgatttctccagttcatggatggttttgccattttcagcaatttgttctgtgagatctgctatctcctctgtaaagaagtaagtttcagttgcatatgagcgcctctgcgtgggtttccagacatgcaaagcattgactcaatgctttttacctggtttattataatcctaaggtttcctgcttcctagagataagatattgtacagagagaggctaaaacgtaacccgtcagatggtgaacactttctgcatgtgcattaacacacatgtgtgcaggaaactgagtgatgaagccacacccacgccagcatgctctcgagcaatagagcatgaaaggaggaggtttcagagggtttcgaatagcttacgctctaagttcttattttcccgtttcacagtttcaagttgatctaaggcttcctcgtaggcatttttcagtttgaagagctcagtgctcaaggagcgggactccttcagggatgcctccagctctgcttggctctcctcacactttgtcttccactctgccaacacctgaaacaccggacggaagttctctccgtttctgagctctcctctaggtttctaacaaaatactaaataactaaattaaatgcagagttagggctacacttggcatcacttgcctggctccttgttgtcgattattgggctaatcaagattctgttccataaatgtactcaaggtaatgagtcaggaacaattgccatcttgaaaaagcaaatagatcctttgagaaggaattagctgggcataattgtccttttcctaatataaaaagggccctgtacttctaaatatttcattaaagcattggttccaatcaactttatctgccatcttgaaagaagggcttccagaaagcctcccaataggatctcagcttagacagaccagtagtacggaaaggaaaaatgcttaggactgcacggacattgtagaaattggtttgtttccacggacaacatttgaaagggacctctacccccagcccattcccattctgttttgcagatgaggaaactacagcccggtgaagttcagggacttgcccaaggccacactgctggtgagggcagagtcaggtccgggatgcattctcctccttccacggctgctaggaatcccttacatcatggcattcacccagcacacagcggaccccacaccttgtcaaagttcctctgcttcttgtccagagcggcggccaaggaattggctctttcaacatcaaccatcagatcctccacctctccttgcagcctctgcttggtcttctccagtgaagcacatttagcattcactgcctcaacctgttcctcggaatcttgaaggcgctgagcaagttttttccttaaagaatatgaaagagaagcagctgttatttcagtttccatccacttgaacatcactattcatcaagttggaatcactaatctatgtgattcagacacccatgtgtttttatacgcccaggagaatttcctgtctactcaaaatctgggatcaataacttgccttgtgtctgaccaagatcaaagctgtttgttttaataaaatgtgctaacgccaggtccctctaatggcccagcaccgcatttaaagacacatgagatggggaaacgcctagtaataaaaataaattcatcgaattcattcctaagtagttcttctaaaagcaaacagagctgcgcacttggcctcctccagctcttctgtgcgctggatggcgtccgtctcgtatttggttctccactgggcaacctcactattggccttggacagcgccctctgcagctcagctttgccttcctgctcctcctcatactgttcccgcagcaggtcacagtcgtggcgggaggactgcagggcgtgcgccagggcgttcttggcctgcagaagttaaaaagagaagagcacctgatatatttagtgccaggtgcatgatacaatccaagtgtgtcccttctatcaccaccttctgaatgaagttgccttttattttttcctcctacaggtgatatttaaaaataagggcaaagaagtcttccttcaatggtgtaccttgttctcttcctccagctgcctcttgagctcttctgtttgctgggtaaaggcttgcttgctcctggaaagttgggatactatgctttctttttcttccagctgacgactcagctcacctgtgtccagaaggaaatagtttcatttcatttattcactcattcactcaccaactttctattatgtgtagggcactgtgctaagatctggggagacagaaaatgataagatatggtttcttcttcagggagaaggtatatggttcatga[136 bp omitted]tggtgaaaccccatctctactaaaaacaaaaattagccgggcgtggtcatgggcacctgtagtcccagctacttgggaggctgaggcaggagaatcactggaacccaggaggtggaggttgcagtgagccaagatcatgcctcaatctcaaaaaaaaaaaaaaaaaaaaagatattgttgtaaactactggaaggtgggactgatgtctgtcaaaaaaaaaatccattgagaagaactgtaaatgtaaacgttaccaggagcacctaataactcccatcagacctccccagtggcaggtgtttccagctgtttattgatttgttatcgacaaatacatagggaaatacttagagctttatatctctagttagactcttgggggaatagggtaagttcaagtttatatgcttacatagaggtaagagaaaaacatagaatggggctttat[145 bp omitted]tgaaaccctgtctctactaaaaatacaaaaattagccgtgtgtgttggcatgcgtctgtagtcccagctactcaggaggctgaggcaagagaatcgcttgaacccgggaggcggagtttgcagtgagccgagatcacacaattgcactccagcctgggtgacagagagtgagactctgtctaaaaaaaaaaaaatgtggctaccaaacttcttttcttcattgtcttggctgtgactgccagccgaggatggattcacctgtgaggatgcaccagggctgggtgaagccacattttctaggcgaaaactccaaataacattcccttaaactttttttttttttgagacagagtttcattcttgttgcccaggctggagtgcaatggcataatctcggctcactgcaacctccgcctcctgggttcaagcgattctcctgcctcagcctcccaagtagctgggattacaggcacccaccaccatgcctcgctaatttttgtatttttaatagagacggggtttcaccatgtcggccaggctggtcttgaactcctgacctcaggtgatccgcccgcctcggcctcccaaagtgctgggttgacaggcatgagctaccacacccggcctcccttatgtttttattatacaccaggacctttaaacactggccatgtttctctctttagtctcaaaaacttggacgcagacaatgaatatctgagttaagaagtatcaaggccctggctcttagtttctagtctcatttctgcccatcagagtctgtctgatgcaagtttatattaattttgaaagagtttgaatgagatgatattttgagccccttctcattctggtctactcctctttctctcttattcttactgaactctcaatgttctctcccttcaggctatttcaaatggctctttctatgagttatttcaatttcttctctcctgaaaagatgcttccctagagattctccctcaaacacaccctgcccttggttttggccagctacgcccattgggtgccaggaggttttggccccacgggttttctgcacgtggcttaccagcctcggtctgcaaacgagacttctgtgtggtcagctcgctcaggctcctctgaatttcctcattcttgcccctggcctcacttaactgatcctccagggttcggcagattttttccagatttgcctgaaggattcagaaaggggagcaaagtcagtcagcaaagtcaggtttcaatgaccacggagtgtgtctgatggaaagccttgagccacccccaccccgcgcagcaccttagatttcgacacactctccatgctgctggagaggtcatcgatctccagcttgaactcgctcttctccttctccagcttctgcttgacccgctgcaggttgtcaatctgctccccaagctcggccacactatccgcatgcttcttcctcagcgcggccaccatggcttcgtgctgcagtgtggcctcctccaggtccctgcgcagcttcaggaactccgcctcccgcttcttgttgagctctatctgcgtggaggtgacgcctcccgcctcctccagccgctcgctcagctcctccagctcccgggcatagtcgctgcgctgtttctctgtcttcgcgcgggtggccctctccgcctctatctcctcttccagctcctcaattcgagcctgtggagggcagccgttcaccccgtgggcagtgggttcaccgcggggactctgattgccaagaacaggctggtttcccttcccattagacaaactgagtcttagactcccctccaatgaatactgcaaatttcctttcacaggaattttttctgccccaacatggtaattactcctgcagtgaccaaacctgaacattttccaccaactaaatgttaacttttagttgttaacttaaatactttaattatggattaaagtatttaatcagatgttttggggaaatggttcatcatggccaggccagcctagcagaaagggaaccatgaggcaggtggccccacagtcttgcccactttctctaaatggcttatagcagacagcacccagctcactgtaagtggcctcacatggaagagagaaatgcagagggctcctacctgcaactctttgattttcttctgaaactggaggcccagtgtctgctcatcttccactttgctttgaagttgacaatattcaaaatctttcctgtgaagagaaatgtagaatgcatgaagacaaaatacacagtaacttgcaaaatggaagccagtggttgaagggcatacttcttgagcctttcgtccagctgttgcttgtcattctccagatctaatatggactcttgagcaagcttcaagtctccttccaatttccttttgttcctttccaggtctactcggagcttcttttcttgttctagggagctttccagctgaaaaaggcaccatttccttttgggaacaaatgctttgcaagaggacccttgagggctcttccaaccctggagttctgggactcccgatgagcattatttacttacgtcttccacttgctgttccagtttgctcttggttttgttcaaagaattgactttgtcttcttcagcttggaggtcatccaaggcctgctggtgcgcctcttggagggccttcttctctctggttaactttgcaattgtttcatctaacccagagagttcctcagtaaggtttttaacctaagaagaattcgcaagcaattataagcttaaagtttagtttgcaatgactatatcaagctagacacacctacaataagaataccttgttctctgtggcatgcttctccttctcaaccttggccagggtcaactcaaggtcatcaatgtctttcttgagctctgagcattcatcctccagtttcctcttcttggccgtcagctcagcattgatctcctcctcatcttcagctctctctgtcacctccttgatcttggcctcgagctggaatttggctttgatcagctgatcgcatctttcctcagcatccaacaaattttcgctttccttaaaaaaaaaagaataataacttcgttgaatgatataaggtttgcgacattccagtatttcactatatatgaagttctttatgaagcatttcaactaaaaagcaaaaatccccaccaataactcaatttttctaaataaataatcaaatctagaagagttaaaaaaaaaaaaaagattgctaaacacgtacagcttgtacttggagctgcaggtcattcttctcttggaccagagtcaccagtttttcctctagctccttcctttttgcctccgacttggcgagttcatctttggttttctggaattcttccttcatggtggccatctctttctcagtctctgcactcttgaggaggggcttgatcttgaagaagagtttcatccagggccagtgcttgacgttcatgaatgagcgaatgttgtactggatgcagaagatggactccctaaaaacaagacattgcttatttctgagagagactccccttccccaaagagctcatgtctgaacaaagaccctgctggacctcctctgcaccatcttctggaattccacacgcatgaggaaccctctgcacacagcttgtgtccgggtgattagtttggccaggcggtcatcccgcatctcttccagggttcccagcaagccagccttgaagaacaccttatggggcagaagggtgacatgagtcagtttcctagagaagctgtgtcaagaggacgaaaaggccagcatctgtcagaactgatgcattaccttggtatgtccaaatttgtactgagtgtggtcaatatcaatggatgccagaagcttttcacaggctttcttgctgtcaatgaattgtccctcagggattgcactggcattcagcactcggtatctgcattgtagacatggaaatcatcacagactgttggcaaagacacaaaccttggagaacatgtagttcaggcctctcttcctataggcagaaggccaaggtcccaggagatgagggaactagctcggagtcacattgctagagagcagtctagaatctagatctcttgactcttcagtcagagcttttcctgccattttgtatatcagataaattccagagaaaaacatggaagaaacaaatatatataacttggccaaatggtagattgttcagtttacatggaggtccatatctgttctttcgaaataggtcttttcatacgaatctttctccctctcaaattccagtgttcgtacatctcatccccaagcatatagaacatgtttattacacacctttgtttaaaatcgccatagagaatcctgtttgggaaccctttcctgcagatgcggatgccctccaggacaccgttacaccgcagctggtgcagaacaaggctgtgttccatagcccctgggaacagaagcgagatatcagccttacacagaatttcttaaaaactgagcaccacctagcgagccagcaggtgtctcacctggagttttggtttcattgggaattatacaacgcacaaaatgagggtgagtagttcttaaatttgacatcagcttgttcaggttttcctaagagaaaaaaaaaatgacatttgccatcctactgtaggtttttatgaagacagagatccattgtaatgaaataagatctatgtttaaaatttatcataagttctaaagtatagtgaaatgatttaactctgtcttttttttttttttttttttttttgagacggagtctcgctctgtcacccatgctggaatgcagtggctcaatcttggctcactgcaacctcctcctcctaggttcaagcaattctcctgcctcagcctcctgagtagctgggactacaggcatatgccaccacacctggctaatttttcatatgtttaatggagacggggttt[131 bp omitted]ggaggtgtaggctagtaactgatacaattgtcttttgtctcccagtgagccagaggctcgccaagtacaaaatgctttctaaaatcaactcaggtgatggatccactgggagcgtgaggtctattgctggtgtcctttaggaaaattggagagtttatgctggaaactcggacaagccaactcagctatctttggtataagataatagtgatactctcatcgcacattggttagaccgtatttattatattttatcatctgtcacttcacctcagtgacagtaatcagattaagacaacactactactctcaaataaatcaagcttagaatctcagcattgctcatttagatgtcacttaaatcaattataagcaaataaacttgtatttttcttaccctgaaaagggcagagacagtttggaaggaagaacccttcttcttggcaactttcttctttccactgtcagctgaaagcaataagggagggcacgtgctgtaggtgaatctaaaaggttttttgttactgtggaacaaatggagggaaatcacatggacacaaagcactcctcttaccatccgccgtggcaaacgtggcatagaggtgtgccaggagcctgttggaagacttctggtacagcccaaccacagtctcgttcagagggtccttgttcttctccagccaacctgagacactgtagtccacggtgcccgcatagtggatcagtgagaagtgagcctcggccctgcctttgaccaccttgggcttctggaagttgttggactttccaagatgctggtcatacagcttgttcttgaaggaggtgtctgttgccttggggaacatgcactcctcttccaggatggagaagatgcccataggctggattgaaggcaaggcaaagtgcagagaggtaaatatgagctgcagtaatgagcagaagagtctatgagaagagcttacggtggggatggaactggataccttctcgatgagctcgatgcaggcagccaggtccatcccgaagtcaatgaacgtccactcgatgccttccttcttgtactcctcctgctccagcacgaacatgtggtggttgaaaaactgttgcagtttctcattggtgaagttgatgcacagctgctccaggctgttatactaataaaaaaatacaacattcatgtgaaaagttagacttctttcagaatcaaagactgtcaacattcctcctcattgccccaggttcctgtcaaacacattaatgctttcaaatacaatcacaatcttcaaggcctgcctcagaccgcatctcctccttggcgtcttctgtaaacttccaattagaaggtgtttctccctttcctgagttcccaaggtctgggcatctcttgtgtactttattttgtagttactcttcaatgtgccatatagacttctatttcttctctactagactacaagctcatctgtttttttcacctgtatgtcttgtacctgggaaacctaaatatacactttgatgagtggctatgcacttttttttttcttttttttttgagacggagtcttgctctgtcaccaggctggagtgcaatggcaccatctcggctcactgcaacctccgcctcccaggttcaaatgattctcctgcctc[134 bp omitted]gcctcccaaagtgctgggattacaggcatgaggcaccatgcccagccgcggctatgcacggtctaacacagaaccagtgggatatttatagaaaatagtgcgtgattaacttatcaaattctctgtatctatttgatggcagtccctaaatcagtgattgcatttaattttttttcttttatccatttgaaaatgtcctttaaaattccacttgatagacatcttctcctcttttaaaataatacaaacccagccaggtgcggtggctcatgcctgtaatcccaacactttcggaggccgaggcggatggatcacttgaggtcaggagttcgagaccagcctagccaacatggtgaaaccccatctctactaaaaatacaaaaattagccaggcatggtggcacacgcctgtaatcccagctattcaggaggctgaggcaggaggttcacttgaactcaggaagaggttgcagtgagccgagatggcgccactgcattctggcctgagtgacagggtgaaactcagtctcaaaaaaaaaaaacaaacaaaaaaccctaatacaaacccttccaataagtaccgctcctctattccatccactctccatctagtttcttacaggaaactaagacagccgccatcttgctatcttccctttaggatcatgaaaccaatttccctcatatgaagccatatgaaaatatgaatataagtaacacaaacctcaaagatttcaaagcctgcaatgtccaaaacaccaatgaagtgttgtcttggaagcttcgtatccagttgctggttaatgcgagtgaccatccacaagaacaacttttcataaactgattttgaaagagcattcacagcatggtgaacctatcaggggaaagatcagctactggatatgaaggaagtggccagcagggtcctgcaccctttcccggccttgaagctgttacctgatccacagtttgacctttggtaacgtactcattcccaactttcactctaggaaagcacaaagcttttaggaggtccgaagagttcaggcccatcagataggctgttttgtcagccactggcaagaaaacaaggacagtgcttagaaaagtagaagagctgctttgaaaatcatccagaagtttcaaaggttggttaagttcatcttggtacattgtgcattccctgtggctaaactgcatatacatggccaatggaagctaagtcactcagagaatataatggactttatgaaaagccagggctgggtctcagaaagccctggtcatccctcactgcatctgaaacaagactattcgagtgattcaggaaaagcgagtggtaacaatagctatgggcatcggaggcccagaaagggtcattcacttctccagatggaaggattaatcgcttccatccatttttttttttttgagacagtcttactgtgttgcccaggctggagtgcagtggcacgatctcagtgcactgcaacctctgcctcctgggttcaagaaactctcatgccggcagggcacagtggctcacacccgtaatcacagcactttgggatgccaaggcaggcgaatcatttgaggtcaggagtttgagcctggccaacatggtgaaaccccgtttctactaaaaatacaaaaaagttagccaggcgcggtggtgtgtgcctgtaatcccagctactcgggaggctgaggcaggagaatcacttgaacccaggcagcagaggttgcagtgagctgagatcatgccactgcactctagcctggatgacagagcaaaactctgtctgactctcgtgcctcagcctcctgagtagctgggattataggcatgctccaccatgcccagctaattttttttagtagagatggggtttcaccatgttggccatgctggtctcgaactcctgacctcaggtgatctggccccctcagcctcccaaagtgctgggattacaggtgtgagccactgtgcctggctggattaattgctttcaaaagcagtaccaagtgacctcagcagatcagccacccgctctggtttgctgtcacactgattttgtaccttctgtgccatccggctcggcctgctcctctcgctgcttctgcttgaacttcatgttcccgtagtgcatcacggctcccgtcagcttgtagagcccagatttctcttctggggtgaagcccaggatgtcaatggcgctctggcatggaaagggcagcacgtcagtcagttggccccagtgatggaggaggaacacccaccccttctgttggttccacttacgtctgtagccagcagctcctctgcatcatctatgctggccaccaggatctccccctggctaatgaacgggtagtcgtaagggttggtcgtaataagcagcagctctgaaatgacaaatagttccaggaggttatgcagatgcaaagaaaaaacccacccagtggacttgagctcctgcaccctgggctggaacttttaccgctggatcctaaattgaacttagaattaaaaatcttttagacagttccacaatactcaggctgtcatggaaaatatagtccagggaagacttttcagtctcccacacaatggagatgaaggaccctagagagaacctttaaattcccttgccttgcacgctaatggtgcatatcagtgtcggctgggagaagttaatagggaaaactggctgagtgcgggtcaggacgagagccaacccaggtggtttggtataatcatagccttttctaaaatctgttgaaaagcagcagcctgtttccaagctggagaccagaaggctgagcaaatacagccaaagagcaaagaagcagtgtgcatggagacctctgtgaggggcagacaaggggcagtgtgcagtgcctccgtgggcttgattattctgtttgctttggcgtcgcatttggccataggttgtttctgtgccagaacacaagggggcgccaaaggacagttaggtgttcagttgctcagaaggtttttataaaccagagctggtcaggagtggtctaatcttgttgccctccatttgattaggttttcaaattggcatgtcactgcccagatagccacatcccatttctaaaataagcttttcctggcaaagtgcagtggctcacacctataatcccagcactgtgggaggccgagtcgggcaaattgcttgagcccaggagttcaagaccaacctgggcaacatggtgaaacctcatctctacaaaaaacacaaaaggtagcctggtgtgggggcatgcacctgtagtcgcagccactcgggaggctggggctggaggattacttgaacccagaaaggtcaagactacaagtgagctgtgcttgtgccactgcaccccagcctgggcatcagagtgagaccctatctcaaaataaataaataaaataaaataaactttccctgttgactgtagagtcactctacgtagatacaactctccttggtctagtgatcagagtcaaactacctaaaagaccagccccactggtgacttcctcacctatgagctcaggcttcttgttagaaagaatctggtagaagatgtggtagcttctttcagccttcagctggaaagtgactcttgatttttccagaagatctggaacacaaacacaggactctctttcaaactgttcccagttaactctgagacgccatcgaatccccatggatctacttacaagtttcaatatctgcagaggccagcttcccagtggttccaaaatggattcggatgaacttgccctgtatggggcgggattcagggggagaccagattctaccatggcccaatagttcctattcatcttatgggtaatttgagtaggagcctagtccccctaaaatttttgttttgttttgttttgttttgttatgtttttgagacggagtctcgctctgtcaccaggctggagtgcagtggcgtgatctcggctcactgcaacctctgcctcccgggttcaagtgattctcctgcctcagcctcctgagtagctgggactacaatcacgtgccaccacacctggctaatttctgtatttttaatagagacggg[147 bp omitted]cttcttcttcttccagtttggggttttccttatttccttttatttatcccttttattctatgctcatcccccacttcaacgtatctagtcaacaaagcaactacagtgattgtttcaaggtgtaaatcaaaccatatcactccctggcttatagaatccctcagtagcttcctgttacacttcaaaaggaatccaaactccttctcatggcctgtggctcccacatgaccaggtctctctctcttccacctcatctcatggaactggcccccctgccctcctccctacaaccacacagaccctctgtaggtgccctgactgcaccaggccctcccccatgtcagggactgccctggcccttccttcgttccccctccttcctgtcatttcaagttgggctctttctcatactgcggctctcagctcccgtgccagccccacagagaggtcttccctgcccaccctgcctaaagcaagcctggcccccagttcctctcttacacacgctgttcattgaacttggtctgaatttatctttatctgaaatggtcttgttgggttgttttgtttttcatcatctgttgcctctggtctctacactctttgaggacagggctcttgcctattttgtgaggcacaaagcaaattccatcttaaccaaactcagactcacaaaacgggaggagttgtcattcctcacagtcttggcgttcccaaaggcctccagcaggggattggcactgatgatttgatcttccagagtcccctaatgcaagaaattgagggaagaagaggaaacatttttttttgagatggagttacactcttgttgcccaggctgcagtgcaatggcacgatcttggcttactgcaacctccacctcccgggttcatgtgattctcctgcctcagcctcccgagtacctgggactacaggcatgcactaccatgcccggctaattttgtatttttagtaga[155 bp omitted]tgctcacccactctgtgactctggcttgccctgataaagccccaccctccttgactttccaatcctaggaccaaccaaatcagcagcatgtcttactcaaaacacttttgccattttgttatatttggcactacagttggggatctcttgactgagcattcctttaacacttcaatcccttgattctccagtcagttgtccgtattcatttcatgctgctgtaatacatttgtttcaaaagcccaggatatgctgtgagtcactcacattggtatatgtgattcttccacaaaagaacaagctctctgagccgtctgcagattgacctctgaagtttagccctagagccttgtcttctaagaaatcccgggatctagtcctacaagaccaacttgacactgcgttgtctaaggtgactggctgtccttcaagatagtaaatcctagcctgttctccattctctgaagaggggggaatgtgaggacatttggccccctcattctgaggttaagaccacagttaaaagtggaagcaaagcaagccttcctctcccatctataccttcattttggagtccttcttcttggccaggtccccagtagctgcaattgttgcaaagtactggatgacccgtttggtgttcacagtctttcctgccccggattctccgctgtacagagtgatcaaaagagagagaaagaaacaagtctgttagtataaacaggcttttcaggatgtcatactgaggcctgggcatggtctgagccatctctgacacacactcaccacactaatgtgacagaccacttgagaaggcagacgcccagggcacaggtgccacaggcacttgctcagctgacccaaggatgggtaattccatttttctgaggccttatgcagaccttcctccccatccccaaatcgatctttttattttttatttatttatttttctcttttattttttattttttgagacagaatctcactctgctgcccaggctggagtgcagtggcgcgatctcggctcactgcaagctccggctcctgggttcacgccattctcctgcctcagcctcctgagtagctgtgactacaggtgcccgccaccacacccagctaatttttttgtattttttttagtagaggcagggtttcaccgtgttagccaggatggtctcgatctcctggacctcgtgatccgcccatctcagcctaccaaagtgctgggattacaggtgtcagccaccgcgcccagcctgatctttttattatagactctgctccaaacactttctaatgaacagaatagagccagtggcacagctatgaaaccactctatgccatggatacttacgtgatcagaatggactggttttcacgatctgccagaggaaaaaataaaatagagttgatggcaatagaaaaagagcttcccgattctacccaactctcaagtagccagagttaaattgcacaattcctcttcctttacattttttgtttagcctttaggtgggaatctgaagagcctccatctgctttttattttattttatttttaattgacaaacaatatttgtatatatttgtagggtacaacatgatgatttgatatatgtttatatggcagaatgattaaatcaagctaattaacaaatccgtcacctcacatacttatttttttgtggagaaaacatttaaaatatactattttagggattttgaaatatacaatgcattattacttatcggagtcaccattctatgggacagatcaccagcaccgatttctcctttccagctgtatcctttggtcaatatcgaaagcctccttcttgagactgagactcagagagggcaagtctccactcagaatcagccagtggcagccgggtgcagtggctcatgcctgtaatcccagcactttgggaggctgtggcaggcagatcacgaggtcaggagtttgagaccagcctggccaacaaagtgacccctgtctctattaaaaatataaaaatagccggacatggtggtgcatacctgtagtcgcagctactcgggaggctgaggcaggagaatcgcttgaacccgggaggcagaggttgtggtgagccgagatcacaccactgcactccagcctgggcaacatagcaagactccatctcaaaaaaaaaaaaaaaaaaccagccagtggcttctcatcgttcttgctgtattaggctgaactatataaaatgatcagtttttggttttgatccatgaaaacatccatatccgttttgcatattctaacttgcattaaatccaaaactcgtcaccttggcatgcggggccctacatgatgcagcccctttctgcctcttttggctccttcttcctcctttccctgtgctaaacaccagatggggtccagcctgggagtaaggggcaactgccgctcgcctcatgcagtgcctgctccagcatcccatgcttcctcctgggaaactcaccagtcagcatgaactgataggcgttgtcagagatggagaagatgtggggtggggcctcctggcgctttttgcctcggtagccttccaccacctcggggttgtacaccggcagccacttgtaggggttgacagtgacacagaagaggcctgagtaggtctgtgggaggaaaaacatatacgtgcgtatatgtatgtatgtgcatatggaaaaccccttgcctttattattattattgtttttttttttttttgagacggagtctcactctgtcaccaggctggagtgcagtggcacgatcttggctcactgcaacctccacctcccgggttcaagcaattctcctgcctcagcctcccgagtagctgggactacaggtacatgccatcacgcccggctaatttttgtattttagtagagatggggcttcaccatgttggccagaatggtctcgatctcttgacctcatgatccacccgccttaccctcccaaagtgctgggattacgggcgtgagccaccacacccagctgcctttattattatctcatgtttctttgggataaacttataaaggggggaggctaccattcctatttatagtgaggcactgagactcaaaaaggggagtggcgaccctcccacagttggtaagtcacagcaccccgtgaccaagcctggccccagcttccccgctctccggctcctggtcctccttcccaccttccttcttcctgccccatccacctcttgctttcttgccttctttctcctccgtctttgtgttttgttcatcagctaggcaagcactcatcttccagaatcccacggcccacacacatacctctgcctccctcccctgcccgcatatctaatgccccagggaaaccacgtcgaaagccctcgctgacatagatcatccaagatgtgtaacggtccttcaggttgtacagcacggctggctcattcaggtgcgtcagcatggccatgtcttcgatcctgtcgaacttgggggggttcatggcgtacacatcctctggtttgaccaccagggtctaaaaaggaagaggcacagtgcttcactaagatggtctgcacgtcttttttttttttttttttttttttttttttgagacggagtcttgctttgtcgcccaggctggagtgcagtgatgcgatctcggctcactgcaagctccacctcccgggttcacaccattcttctgcctcagcctcccaagtagctgggattacaggcgcccgccac[147 bp omitted]tctgcacgtcttgtctgctgcccccaccaaaagaccaagagactcttgagccgagatggaagggccaaaccctagaacaagcccagctcacagcgagaggaggaaaggctatggggcggcttgtggtggtgctgatgaaatggggtttgtttctgttattcagggtgtcttcttcctccccattgggcctgaggtgagagacggatgtcggaaatgagaaaagaggatctgtgtgggtggatatgggtgatggtggctgggaacggggccagcaggaacctttcagctcagtcagtaacactgcctggaccaaaatccagctccagcagctggctctttcctgtctactgagagaaaatgacgcatatgtcccctgcagtcgtgaggcagggaccgaagagaatgaggaaggggcattggattgccaggctggtgcccatggattgccaacattctgagctctctgaaagcagctgtccagcccccggcccacctcttcccccttcaccacccagccccagcatgctcaggaaagggcccctcagttgccctccccacccctttcctgccctttctggggtcagagtgttataagccaggcaaacggcaccatgaggcagagcagtggttctgagcacctgcacttctctcagcaggacaaacccccacaccctcgggaagctggaggacctcaggcacagggggtggggaacttgtcttcctcttccctgccctgtcctcacctcctttttctctgtgacctcctctgaaatggtcagttttcctggttctgtctctgggcagtgtggatgggaaacctgccttttccctgccttcaagcagggattcattcaaaccatcccggccaatgggccctggctgtctatgatggtctcttaggttcatcttagattatcattcactgtatctagcttcctccttccctgacgtgttagcagcccattcttagctccttattggaaatacacagagagccaccttttcggagctccaatgcttggtagcactgcagggcggttcttattttttggggggaccgagtcttgctctgtctcccaggctggagtgcagtggcgtgatctaggctcactgcaagctccacctcccgggttcacgtgcagggcggtttttaatgccttttttccttcatgcccaacccaatgatagtatttcctttacttgtctcttttattttctttctttctttctctttctttctttccttccttccttgctttctttcttccttctttctttccttccttccttccctccatctctctttcactctttctttcttttttcctttttttgctttttacttttcttgggacttttccagattctcctgatgtggattttagaaactagtgagctccagaattcctcgcagcacccccacagtggcttgggccagaatgtaatgggctgcagtgctcatccccttcatgatacaaggaggctgctatttcactgagcttgtggtcccctaggatccctaacacattttccttacttccttggttagatggccattgatagaataatttgggacaaatctaggctaccaaaggagagtgttctgaaacagcgctcattcatgttgaactcccaactccacacccttgggacacgtggagctgggcccctctggcctacagtgaacgtggacaaaaatacctgaaaactaattgttttaatcagccacagccagactctattcccaccctggaacctgaggccagtattcactctgctttctctgaggatacctgggaagccccaggctacattgtatgcggcattccagtgctggaaccacatctggaagtggctggggttgggcagatgcataccccaggcaagcacaaggaccaggtggagggccagcagcctgtggagggtacagagccttaccctgttgtcctcagtttccacagtgaccttcccatcctgagaactcttgattttccccttggcatattcttcctttgagtccaccacgaagcaatacgtcttggcatcaaagggctggttctgagcctcgatcctctccttttctgacttccggaggaaaggagcagctatgccgaacacttccatttcagtgtcactactcatggtgtcagctggaaggcaaacccacccggtgagctcagcagcccccttgccaggcacccagcagctccaggcctgtttcagcctccaccctgccctccttcagccgcaggagccctcagagtcagggccccaggaaccaggctgtcctcatgccttgagaagctccacccaaagggcttcagtgctgggaaatcacacgggtgcatatttattgaggggcttcttgtgcgacagtcttacagcctatttaacccaagctcctcaagcatctgaggcttgaactggcgataaggggtttggaagtgagcaccactcttgggaccgccttttccgcttctgtgacaaccaggtgttgctgagggaacgtttaaaaataaacacccttaaaaaataaacgccatcttcaaagagagtgtgctaatggcaaacagcaaagatatttttgaaccatttcaatcaaggtggctacacgctcgtatgcgggaacctgccttttgcttccttgggttgctaagaacaaaatcaagcatctgacatcagcatctgtttgacagtcccccaaatgccacctcctctcccgcctgacctgtccttgccttttttttttgagatggagtctcactctgtcacagactggagtgcagtggcacgatctccactaactgcaacttctgcctcccaggttcaagcgatactcctgcctcagtctcttgagtagctgggattacaggcacttgccaccacgtcctgctaatttttctatttttagtagagacggggtttcaccatgttggtcaggctggtcttgaactcctgacctcatgatctgcccacctcggcctctcaaagtgctgggattacaggtgtgagccattgcacccggccacgacctgtccttgtctaaatgtgctagttcccctgtccctctgtgcccttatggccggtgggaggagggagaaaggaactggcaagcttggattgcctggagatctccaacagccgagggacagggcccaacttctcacctgagagtcccacctgcaggatgagagcagaagacagcaacagccaggagatcccagacctggaagaatatgcacatacacaacttagcggcacttggggtggctgcgtccatgta[132 bp omitted]caacatagtgaaaccccttctctactaaaaataaaaaataaatttaaaaaattgctgggcgtggcggcagatgcctgtgatcccagctactctggaggcttaggcaggagaatcatttgaacctgggagacagaggttgcag[132 bp omitted]tgacccacaggaagccaggcagggaggaaaaaccctcagctgtgcagaaatctggtttctctcagcctgcactggcaccttcttcagtcttcctcactcccatttagaatcggacagcagggaccgcatccctgcttaaagtcaacagttcgagggcaggggcaggtctccttgtctgtgaacaggcaatatctctgagattaatttacacgcaatgcccacagccagtgtggtcttgagaggacaagacacctggcagatgtacagcccaggtggggaaggtgagggcagagtgaggtccccagtcctgttgacccttcatgggtcacagaggcaatgggagaaggtcaagccatggcagctgggctcacggggcatccaaaaggatcctgcccaagaggacacttggagaggaggacaggggagagtgtgtggaggagagagaacctgcagggctcctgcttgggggaggtgctggagccagagggtgctgggtgtttgggcccagggaacctcgctctctacaccttgcttatcctaagaaaactcagaaaggcatgaggcgccacctcagcagagccaggcagggccagggaaccacgcacggggtgtggatgtgctcaccgggtgggtgtgctccaagcagctgagacctagaagaggagcctgtgacttacctccgcccacaagcgagccacagagggctggctgctccccggggcttttataggccattggtaacccccgcggctcattccttctctatatttggcaagaggatgagtggcccccccaagccgagaaccagcttcttccacacgtatctttgtcgttgccaagggaaaggtataattagaaatgagcaggatccatcaccattttccgaccgcagaatgtcaggagcttgggatgcctttctctgaacttggggccggtgctccctcccctgatgggatgggatggcctcactccaggaggagttgcgggggcagccacctccgttctcaggcgctcatcacaccctgaacgcggcgtgagcccctagctattgggcaccaaggactgaagtcgggtggcttacttagaaatctcatcatatggaaaagtgaataagactgagagtgaaaagttgaaatcctttttgaattttgagcaagattttatcacaaccttgggttgtgattgcaaaacctgtgccaggaataattaataataataataattaatagcaataattcccctccccccttgccctcttctcccttctcctccttctactcctctccttctttctcttattttctcctatgcaacgttctgtctcattagtatcattattaacttaattctttcttaagctctaataggaccagccagttaagttagtgacgtggatctatgctgccagctcgtattcccggcgacagctgcctgaggacctgtggctattaagacagattaccaattaggaaagaccagctgctggctgggatggggtagggggaacggtggtggcctgcagagaaagggcggacaagggggggctgtctaacaaatgtggtcatctctaaatcaggagtggaaaaataaagcctcaagagaagagtaaagtatgtcggacgcttttgcccattctcgttctactttttttttcttgacaaatctttgggaggatggctgggtgggcaccctgtggttgcttattccaaatagaactgtttgtccatgtttcccatagaaaccgccccttccgtacacagcagtaccaagccccgaagtggaggccactccatgaggtctgcgtgggaccggggaggcagggctgcggtctcagggcaaaggcacgtgtatgaaacatcctctgtgctctggcccttacacacagtgcttcgagaagacgcagaggaaacagaagacgcagcctttacccttaagggtttgaattctagatgatgagtcctgtggatgctacagacgcatttacaaaattgaggtgatttcacattgaagcaacaagtttatgaagcgcctgttccgtgaatgccaggcaaggccagtggccgccaatggagtcagttgggcagggctcactcaccccttgcctgtccaccagccactgagcgttgcccccacccactgcccctctccctccaggtgagactgacatgtccatccttggagcccctcctcatccaaggagagggtaaccgtcactcctaaagtgtccgtccatgtcgtaaagggagtggtcccctggggctctgccctgttggcccagtgatgcactgtctccttgggagtattggtcaggacagccacggacaggtaaatatcaccgaggggagcagcggtgttaacaaggtccgtggggtcaggggacagggcaagctgtcctggctacatctccagcagtggtgtatgcagggcaggctgtgggtgtggcgggggtggacgtgggaacttgcagttcctacgtcaacacccagacctgttgacaggaggaactgtgtggaaatgaaatagggggcaattttgctttttcccttttgcagtgaccaatgtactcatctatctatataactacatccatactcacctccaggagacagaaaagaaatattcccttcaacatttcttttagttcccttaagagagcacccatatcacgttaggacctaatacaagctctaaaatgctgatggcttctcgcctggctttccacactgtccttgtttccttccttctcttcatcagaattcttcatcttcagcaaacaaatataagtgaatctaggagaaaacgtcacagactcctagagtgttcagctgtgagatcttggcagtttcttttagtctggatcattcctcctatcttacgtatttatttttcagtaatatagacatcactggacactttttatgtgtcaggcacagaacccagaacttccagagtgctccacatggagatggcctggtccctgccttcaaagaggcattcgtctgtagggctgagaagaggaagacacgttcccccagatgaactgtgtggtacaagatcaaaggtgttgagtggaccagaaaggcacccatgctgatcgcgttcaaatgagggagaaagaacaccctgctgaaccatctctttggctgaactgtctccttttcagatgaggaaaccgaaggcaggagccacaggaagcttgctggaagcggtgagaagagggccagcgtcagggatagaggtcagctctccaggagaaatcccgcagtggctggaagggacagcacccacggcagtctggagagcagttgaaaagctggatatcaggaatcacaaagtctggtcatttggaaacgtatctttaggagaggtgagaactgcatgtacttccacagcagcaggtcggagcaggaggagcatggagctgagagtcctacaggcctggatgtggatcccggcttgcccgcttgcacaccacgtgatggcaggcagtgtgcttctttgagccttcgtcttctcctctgtaaaacgggggtgacatacctgcctcccagactagttatgtgcattcagcgggatatcccaacatcgcacacaccatgcctcgtgctgtgtttggtacattgcaggtgtttgccaggtgtaagttttcttctctacctgcagattatggcacagtgtgactggttttcttaatgagaaccctgagtaaattacactgaatatatgtcttattgagatgg[226 bp omitted]gaggcaagagaatggtgtgaacctgggaggcggcgcttgcagtgagccgagatcatgccactgcactccaggctgggcgacagagtgagactctgactcggaaaaaaaaaaaattctatccagccgggcatggtggctcatgcctataatcccagcactttgggaggccaaggcgggtggatcacttgaggtcaggagtttgagaccagcctagctaacatggtaaaaccctgtctctactaaaaaaaaatacaaaaattacctgagtgtggtggtgggtgcctgtaatcccagctattcgagaggctgaggcaggagaattgcttgaacccaggaggcagacattgcagtaagccgatattgtgccactgcactccagcctgggcaacagagtgagactccttatttttttttttgagacagagtttcactcttgttgcccaggctggagtgcgatggcgctatcttagctcaccgcaacctccacctcccaggttcaagcaattctcctgccttagcctcccgagtagctgggactacaggcatatgccaccatgcctggctaatttttgtatttttagtaaagatgggtttttaccatgttagtcaggctggtcttgaactcctgacctcaggtgatctacctgcctcagcctcccaaagtgcaaggattacaggtgtgagccaccgcacccagcctgagactccatctaaaaaaaaaaaaaaaaaaaaaaaaaaaaattccatccaaagagaaaaatcttaaagaagagagtctcttgctgcttcaagagatagcttcaggagtgaactggatcctctcttggaattcatcctctgatgaacaggggacagatgacttagtggcatattattagctggcttttgggaacagaaggagcccttattctttcagccatcacacagccagggataatccccacagccagggcagagctgcatttatcccttgatgggctggaaaatatatgtattgtgtctcaagaatgcaggccggctcagcaggcaatgaatcaggtggctgcccccttcttcacgatgctcggtcacttcctgcccagctattttctccaccgccgccgtttgatgttcagtcctgagaacggatgctggggctcccagcctcgcagcatcatgcccaggaccgctgtctgccagagcatgaagtcagccttggagagcacatggctcctggatcaagagcgttctccatgccccactgtgatggggattaggtgtcactagaaatgaggaactcggttatcctgagccaagaccattccctggcactgaggtgaagggtgggggtcctaagccaaaatgcccagagtctcaagaagaaattcaagaagagagaggccataactctccttttagttcaattcaactatattatgcaccttccccagctttctttctttctttctttcttttttttttttagacagggtctcactctgtcacccaggctggagtgcagtgccatgatcttggctcactacaacctcggcctcccaggttcaagtgattcttgtgcctcagcctcccaagtagctgggattagagggaggtgcccccatgccaggctaatttttgtattttgagtagagaccgggttttcctatgttgttcaggctggtctcaaattcctgtcctcaaatgatccacccgccttggcctcccaaagtgctgggattacaggcaggagccactgcgtctggtccccaactttctatcatgaaaaatgtcaagcatttaggtaagtacaaagcgtaataaatgaacacccatatctaaatgcgaccactgttaacactttgccagtttgctttctccctctctcccttctctttctttctctgtagctaagtcttattttgctatgccatttgaaagtagtagacaatatgcaaattcacccttaaatattcagtatatatctcctaagaaaaaggacaatctccaaaatgccattgttttacccaataaaattagtaataattctatatcatgtcttaggcagttcgcatgtaaatttttccagttcttccaacaatggtatagctgggttctccccaacccccaagtaaagatggaatctttttttaggcattacacttgatgagtatgtctctttagtttcttttagtcttgatcattcctcctaccttatttagttatttttcggtaatataaacattatcggggctgagtgcagtggctgacgcctgtaacctcagcactttgggaggctgaggtgggtggatcacctgaggtaaggaattcaagaccagcctggataacatgttgaaaccctgtatctgctaaaaacacaaaaattagccgggtgtggtggtgggttcctgtaatcccagctactcaggaggctgaggcaggagaatcacttgaacctgggaggcagaggttgcagtgagccgagattacaccactgcactccagcctgggtgagagagtgagactccatctcaaaataaaataaagtaaaaaaaagtaaactgaaataaaataaaataaaataaatcttattggacattttacgtgccagacacagaacccagcccttccagggagatacagatggagacagcctggtctctgtcttcgagaaggcgttcacctctaagagtgagaagaggcagacatattcctccaaatgaactgtatggtacaagatcaaaagtgttgaggggatcaaaaagtcacacatgctgatggtgttcgaatgagggagaaagaatgtctcgcggaacaaggtggccccagggagggaatgctagggcactctgtgaagaggcattcatgtggggccctgtggagcaggaagagtgctcgagaagtcaagggtgcaagaaggcatcctcagcaaggggacaggagggccaaaggcagaagtgggaaagctcacaggggcccaggaaatgaaggcttctggaaagctgtggtacagggaaagccaagtcgacagacatcagacattgatggatttctcgaagggtcctttcctctgggaggggaaatgggtggctggggggacacaggacaggagggggactttcttttggctttttgctatttacctttctgtaacttttgaattatgtgcttggtatatgtgtcacctattccaaaaactaactaacacttaaaaaaaggtctaacatggccagatgcggtggctcacacctgtaatcccagcactttgggaggccgagacaggtggatcaccttagatcaggagttcgagaccagcgtgaccaacatggtgaaatgccgtctttactaaaaatacaaaaattagctggatgtggtggcgtgcacctgtaatcccagctactcaggaggctgaggcaggagaattgcttgaacctggggggcagatgttgcagtgagccaagatcgtgccattgcactccagcctgggtgacagagtgagactccgtcttaaaaaaaaaaaaaaaaaaaaaaaggtctagtatgaaaaatgcttcccaccttgcaaatacaataaaaatgaatattatgcctgctttcaagaaggttatgtagagtcttataaaaactcactgttaatgcaggagtaaaaattgctagcacattttcgtctctgctctgctaaagatattgtgagcattggttcatctaatgctcatgtaaactctgcgagggaggcactatgattagctacgaatcccagaagaggaaaccaaggcacgagacaggtagagaaacttgcttggggtaggtagctagtgagtgaccggccaggattataatggagtccggtttgatgtcagagccttgcagagaaccacctccctaactattaatacatgagaaaagattaggggatggacggttcaggagttatgacataagctggaaagtttgcaaagttaatcagagtaaatttcctgaaaatgtcaaacttcgatctgtgagtgaaagggagagctggtgctgaaagatgaacaagtaatgagttgacggggaaacctaagccacggggaaacctaaggagaggactcaagatgagagtcaggtccaagacactcagctggcaaaaaggagacgaccccgtatctatggtggggcaggtggcggctaccgtcgcaggctgcattgaactcagatgattgacgggacccttgtggtagggagctcagagcaacatgattgaagccgagaagaatgatttgagcaaaacaggtgaagacagattccaaggacaaaaaaaggaggcaggcatggcccaggaccttgccaggggatttggagaaaggaattaaaagtaatggatgggcctgaacaatgacatagacaaggaagcagataaattagtctgccagctatatatcaggcatggaagggaaagatcaaagatcactgtgaggttaccaaagggatgaaattgggagcaaacggcatcatgataatagaaaatatagaagaaaggtggccaatttgggaggtaggggttggttaaaatgtaagccataacctttatttattcatttatttttattttttatttttttatttttgagatagagtcttgctctgtcgtccaggctggagtgcagtggcacgatcttggctcactggaacctccgcctcctgggttcaagcgattctcctgcctcagcctcccgagtagctggaattacaggcacccaccaccatgcccagctagtttttgtatttttagtagagatgaggtttcaccatgttggtcaggctggtcttgaactcctaacctccagtagtccgcccgccttggcctctcaaagtgctgggattacaggtgtgagccaccgaacccagactataacctttaatttaacactgaatttttgtttaaagcagcgatttcaaacctggctatcccttagaatcacccgaagagctgtttgtataatcaattggttctggaagaaaagactctatagcaatagagaggataaaatacttaagaataaacttaacaggagatatgcaaaactttaaactgctgaaggacacaaaagtagatattccttgctttggatagggtgattcaccatcataaagatgttaattatcctcaagctaatatataaatgtaatgcagtcccaataaaaataccaacacttcctttttctggagctagaaacttgattttaaattttgtggatgtatggtaaagaaaatactgaaaaaagaaaagccacaggaggacattctgccagatactaaaacatacactctaaagtctacataatgaagagggcagtgctatgcatgaagagacagactgaccagcggaacagcatagagagtccagaaggaggcccggatacttatggaaatgtgatacctgaaatggcatctcaagtcagtggaccaaagatggactctttaataagtggtgatgagacaaccagatggctatttggaaaaaaaatgaatccggatccatacctcacacatacaccagattaaataacaaatagatcaaatcaaaatgcaaagccaggaaacaggcactaaactagatcatggtagattcttttataatctggaaatggggaaggcccaccatgactcaaaagcagtaaaataaaaaacaatagataaatccaacatcataacaattaaaaatctttataggaaaattaaaatagagccaaaagacatgacaggctaggcacagtggcttatgcttgtaatcacaacacgttggccagctgaggtgggagaattgcttgagctcaggagttccggaccagcgtgggcaacagagtgagaccttgtctctacaaaaaaaaaccagcaggcatggtggtgcatgcctacagtcccagctacttgggagtggctcatgcctgtaatcccaacactttggccagctgaggtgggagaattgcttgagcccaggagttctggaccagcgtgggcaacagagtgagaccttgtctctacaaaaaaaaaaaaaaaaaaacttaaaaaactagccaggcatggtggtgcatgcctgcagtctcagtctcagctacttgggaggctgaggggggaggactgcttgagcccatgaggccaaggctacagtgagctacaatcacgccactgcagtctagctctggcaacagagcaagacaaaaacaaaaacaaaacaaaactaaaagacgtgataaaatggaagaaaatatttgtaatttacatcacaaagggccaacttccttaatgcataaataattcttagaagttacgaagaaaaagacaaggaaaacaacaaaaccctgcagatagcaacaaatggcaaataaacaagcagacggtttatagaaaatgatacacagaagggctttaaacatatgaaaaatgcttacctttccctatttaagaaaaatgcatattgaaaacacactttctaaccaatcacattggagaaaatccaaatgctgggcaagacattctgttggcaaagctgtcataacacacacactcacacttttctggtgggtggaaaattgtgcaactgctacggaggataatttagaaaaacaaactagcaaaatgatacgtgcaatttcccttccattgggaaaaccacttctaggaacctacggtaagagatattttcacaaatactaaaatactgtgagcataacgatatttattgtggcactgttcataatagtaaaagattggaaacagcctatgtttattgacaggaggctaattgaataaattatgttatatccacatgagacaatgttatgcacccttaaaaaagaatcagaggccgggtgcagtggctcaaacctgtaatcccagcactttgggaggccaaggcagatggatcacttgaggataggagtttgagaccagcctggccaacgtggtaaaacctcatctatactaaaatacaaaaattagccgggtgttgtgacaggcgcctgtagtcccagctacttgggatgctgaggcaggggaatcgcttgaatccaggaggcagaggtttgcagtgagccaagattgtgccaccacactccagcctgggtgacagagcaagactctgtctaaaaaaaaaaaaaaaaaagaattagaaaggtctctatgagctgaaataggttaatttccaggatatagcgttaaaaaaaaaacagtgttctggaatgtaatattttgagacaagaacatctaacataggaaggataaatcagacactattgaaaatgattacttatagagggtgaatgggacccaggagaggagtgccttcttatatgattttgacttttgaaccatataaatggtttacagatttgaaaataaatgtaaatataaaggaaaaagcaaatcctgaaattgaatatgaacagaacattaataaatctaacatatcaaactgataacataactacacttacaaaagacttaattcctgtcaattttgaaaagtactctgtacattcttagtgagatatattcaaagcataaaaagaactgcagtggctgggtgcggcggctcacgcctataatcctagcactttgggaggccaaggcatgtggatcacctgaggtcaggagtttgagaccagcctgacaaatatggcgaaatcccatctctactaaaaatacaaaaattagctgggcgtggtggcgcgtgcctgtagtcccaactactgaggaggctgaggcaggagaatcgcttgaacaccggaggcagaagttgtagtgggccgagatcacaccactgtactccagcctgggggacagagggagactcttctatctatctacctacctatctttctatctattcaaatctacagcctattttaggttgaaagagatcaaagagatagaacaaaatgcaatactacatgaaccttggtgaggtcctaggttgaagagaaagaaggaaaaaaggaaaggaaaaaaagaacaatctgatgagacatttgggggacaaattgaagaaatttgaacataaactggatatgaaatgatactcacggaatttgttaattttcttaggtgtgtaaatagcgttacagttacgcaggacactgttgcttacttataggagttttagactgaaatatttggagaaaggtaactaatacaacacactgcaaacaagaagaaaataaaggagtttacatcagtagttttctgatgctttagtttgcttttcttttaccacaagtgaggttgaacctcagcttacacacttgcttgtcatttgtagttctgtgaatagtcttcatatcctttgccctttttctcttaagatgttaatgtttttctattttaagaactttcacatagcaaagattttagtaatcactgtgtatattacaaatattttccccatttgtttcttatctcctctgaacctctctacaatcccaggggttaggcagagcaggtggaattatccccacttgattgatggggaaactatgactcagtggggaatgtttgcccagggcaacagggctgtgggaagacctcatgtcccaggatgtcctgctgccccgcagggatgtgagccctaatagcatcttttaggattacaggacaaataattttccctatacaaattaaaatttcttaaatatttgggcctcaatttcctcctctcttaccaaaaaagtggagttgaggccgggtgcggtggctcacacctgtaatcccagaactttgggaggcccaggcaggcagatcacttgaggtcaggagttcgagaccagcctggccaacatggtgaaaccccatctctactaaaaatacaaaaattagccaggcatggtggctggcgcctgtaatcccagctactcaggaggctgaggcaggaaggctgaggcaggagaatcgcttgaacctgggagatggaggttgtactgagctgagaccacgccattgccctccagtctgggtgacagagtgagagtccatctcaaaaaaaaaaaaaaaaaagaggagttgaactaaatgacctcttaagtcatcttcaggttgggcacggtggcttgcgcctgtaatcccaacactttcggaggccgagatgggagggtctcttgagcccaggaatttaagaccagccctggcaacatagccagaccccatctctacaaaaaataaaaaacaaaaaaatcagctgggcgtggtggtatgtgcctgtagtcctagctactccagacgctgaggtgagaggattgcttgagcctgggaatttgaggctgcagtgagccacgactgcaccactgcactccagcctgggtgacagactgagaccctgtctcaaaaggaataaagaaaataaaataaaaaatcatcttcagctctgctatcttctgattctgtgatttaaggcacaagagagatttacttggaccaaagcactggctttatctcaaagcgtgtatgtatgttgaaggtggggaggcagaggcagctgggttatcagtcccacgtgtgacattctccagggggaatgtccatgacagtacattaccaacaacatttccttcataggcttgagttccgaaatgcctctctccaaccaaaagcaatcaagcacacactgcaacaataaactccagcatttctgttccatggccaaagagtagtaggtcaagggagatactacttttacccacaacccctgcaggcatcatcagtggatcacagcacccaacatttgagcctggccacggcttcataatcatacttagtgctgtattgtaggaagcaaatgacttgactgaaattgacccagagataaactatcttactgacactagactatttttcctaatgatcttttttttcactgtcagtttctccaagtgaaatttacagtgttttgtttgtttgcttgtttgagatgggggtctcactgtgttgcccaggcttgttttgaactctggggctcaagcagtcctcctagttcagcctccctagtagctgggattgcaagcacatgccacagtgcccaattaataatgactctttcttactgcaaagttaatatatgttcatttaggaagatgtggaaaataaaaagccatccacaaacacaccactattattaatgcctgttaaggtttgggtattttttgtgcttatgcaaacaatgggatcaaacttctacggcttacttgctcaaagtacatattggatatcttttcagatcattaaatattaatcaatagctctattttaatggttctacggtaccccacttatgaatgtaccactgttttatctgctgtaattgtttttgtctgcttgttttttgagatggagtcttcctctgtcacccaggctggagtgcagtggcgcgatcttggctcactgcaacctccagcccctggattcaagtgattctcctgcctcagcctccctgagtagctgggactacaggcacgcaccaccacgcccagctaattttttttgtacttttagtagagacggagtttcaccatgttggccaaactggtctcgaactcctgacctcaggtgatccgcccgccttggctcctaaagtgctgggattacaggcgtgagccaccatgcccggcctctgctgtatcttatggatgccctagagttgggcatctaggttgttttccattatttactatttccatgattattacaaaaatactgcagtgaacaaattcttgtgcatatctatgattctgttaataaatgcataaagatggaatagctggcttgctgtatatcaacaaattgctacccagaaagactgccacacttcacattccatcgctttccatgtgagagtccattttacccccatcctcaatgggtaacatcattcttttagtgttttgtcaaactgagacaaaaattccactgtttgaattaaattattaactatttgtattc[136 bp omitted]aagctccgcctcccgggttcatgccattctcctgcctcagcctcctgagtagctgggactataggcaccggccaccacgcccggctaattttttgtatttttagtagagacagggtttcactgtgttagccaggatggtctcgatctcctgaccttgtgatccgcccgcctcagcctcccaatgtgctgggattacaggcgtgagcacctgtaatcccagggtgggaacacccgcgcccagccagggtgttcatcttttatttccttatgaatttgtaaacactgcttatatatcggtgatagtaactctttgttatatatttttgatcaagcctagtaatggtttactttatgctttctgcctttgctgtcatgcttacaaaaaccatccctactattttagtctgactttggtggttacaaaaacaggctcattctgaacctccagagaaagaaagggaggaggcagtgggtattgtaaaactcatgttcattttaaaggaggacacagactaagaacctaacttgtttcatttcattaatcactgttccaatatttttaataatcttgatcatcatactatctttgttacatagtaacgttttacataatatggatctattccatacttttatttccaactggatctttctgttaaatgctacataagtactacactttaaaaaaagtattatggctcagcaatatagattactattgataaggcaggtctttcctccttggtcttatttttcacatttatttttccaaatctcagaatctttctgttgagctacaaaaaaaaaagacactgtaatttttaagtaaggtttattgaggtatgtatattacaattcacccttttaaagtgcgcagttcagtgagttttcacagatgtatgcagttgtgcagcgaccactaccaagacacagatcatttttaccacttccccaaatcccctcctgcccctggcaatcatttgccactgcaatattattaggcctgtgttgaagacttaagtcaggagaaaactgacatatttacattgagtcttctcaccaaggaacaaactattttcttaattaatagctcatcattttttccaaaattttataattttcttcccctggatctgagtcattattacattgattctatttattatagattctgtgtggttattgtgaatttagtaatttttaaatacagtaggcattgatttttgcatatttacaactggatgctgagtagatacataaaacactcaaaagagagttgaagtttaggtgcactagttggcactttggggcctcatgtctaaaagctgccctaatttttcttttttttctttttttttttttttgagatggagtcttgccctgttgccaggctggagtgcagtggcatgacctcagctcagtgcaatctctgcctcccgggttcaagcgattctcctgcctcagcctcctgagtagctgggactacaggcgcccgccaccacgtctagctgatttttgtaattttagtagagatggggtttcaccatgttggccaggatgatctcgatctcttgatctcgtgatctgccttttctttatcttgtctggttatgtgcatcccagaggcactctccagggcctactttttatatccctcgtactcagcttaacataggtattccgcaatgttgacgtcgtcaatcaatcagtgaatgactgtcttgtgctgtgatcccgcacgttcccgacagggctttctgaatgtacggggctgaggctggtacagggaaaagtgagccatacaaaggcctgccctgcttcgggcactgaacgcttgcctgtctccgttaggaatggaatgtaatccttgcagggctctctgccccactttcttctgtaactaagacggccttagcagagcctgggctgacagggaagcaggcagttagtctctcagtctattgcatcagtggttctcagcagcctactgcactagggccaacagagatcaaatgatcctcaatcaggtttcaattgagtatttgagaatgcctacatggaaagactgcactgagccccgataaggccccacagggtaaccaagcagcatctctccctgctttttgatcatattataacaactcgatggagaaacgcttggtatactgtgctgaatagaagttctgacagggagtgacagtcgtctttgacaaaaatttcaaaagtggggcaattaaataattatcagaaaatggaatttgtttatttgagagactcttcaaattgtgtttcatgggagcgaaattaaataaagagcttcctggagggggaaagattacttaattcattattctttcttgactttttccccttccct
